United States Patent Application Publication US 2026/0275333 A1 - sequence listing, part 23

SEQ ID NO: 3045 - RNA, 64444167 nt, Homo sapiens (residues 47,259,059-49,407,197 of 64,444,167)
  source 1..64444167: mol_type = mRNA
aacagatcaagccaaactgaaagacccacagtgtcacgaggaagcccaatgaccacccagtttcagcaaagagctattcttgacaagcatgactggcagagaggaaatgtcaccgtgagaacgcctccaaacagcatttcttttcagggtgtggaggtggaaggagggtgtgagaaagcaaaccacagatttgggaacaatgaatgttcccaaggaagcacgtgtgtcccttttcactcaagtgaggaaccaactggttggtctgaatgggagccccgaaagcaactgccctgaccatcctattacatcagggctgtactcacaggtgagccaggattggagccaggctgtgctccagccctgctgcctctgggatcctgggcaccccatgcctcctctccagacctccctcagtttctccatctgaaaatggcactgtaggacaagatggacctggagggcgccaaccaccaaaggcgtggaattcacacttaagcgtcactgggcacaggtggccgccctctctttctgaaacccccatactggaggctccagggcaacacactcccctggtgtggctactccaccccttgcttctcctcctcaaccagaactccacatcctcaatgtcccaggggcctcactcctgctcaatgctctacccctgactcgcaacctcagtaagccaatggggctggagtctttgttgagtgaggctgtcctatgcactgggggatgtttagcgcaactctggccaccaatcattagatgccagcagtgtccccatcaccccctcaaagtcatttcaagaactaccactctaacccaatcccacgtacacgtcaagattcccagaattacacctcctgcctgaacctggccacagggaaccctaattcctgcctccagctgccctattgacctctccacctaggggtgtaacagctgctcaaatttacataatctaaactagacccttggcttctcctgccatacccagatctgtcagcacaattactgacacaatctagaaattctctgttgggggccctgttctacattttgtaggatgttgggtggtatctccctggcctccctccattaggtgccaggagcaccccaaccccaggtgtgacaaccaaaaatgtctccaaacattgccagtgggtggggaagtgttacaaaattgcccccagatgagaatggttgactgatatggactatttgaaacacagcaccgagggcttcttctgagatgtgaagtccattcacatccctcctgcgctgaaccctccatccacaccagggtctacgaggcccccgtactgtctccgactccacggactggcctcaccctcactcactgggatgcagccaccctggcctccttgctaatcctacaacacacccagttactcctatagcacaccaacttaatcctaaccctagagcctttaaaatctcttattccttctagaatctttttcctcctgacactggcatggctgatttttcttgtcacgtaaacttcagctcaaatatcgcctctcaaagaggccccgtttaacccctccacctaagtgaactgtgacatctgcttcgcaacttgcccatctcttgcctcatcacattaccttccagacatccatcatggtgtgaactatcttggtgtgaactgcctctcatggtgtgaactgccttgttatttgcctttattattttctctatctttctaaaaacccagcctctacaagagcaggtccttagctgacttgctttgtactctatttccatgcctagaatagtgcacagcacataatagatgttcaagaaaaatcaatggtgaggatgcaatgaatcaatcaataatgaatcaacagcagccgggcacagtggctcatgcctgtaatcccagcattttgggaggctgaggcaggcagatcaccttaggttgggagttcgagaccagcctgaccaacatggagaaacctcatctctactaaaaatacaaaattagccaggcgtggtggtgcatgcctgtaatcccagctactcggaggctcaggcaggagaatcacttgaacctgggaagcagaagtttgcagtgagccaagatcacgccattgcattgcagcctgggcaacaagagcgaaactccatctcaaaaaaaataataataataaggaatcaataatgggccaggtgcagtgacttatgcctgtaatctcagcactttgggaggctaaagtgggaggactgcttgaggccaagagttcaagaccagcctgggcaacacagcaagacccaatcactacaaaaaattagctgagtatgtagctaaaaactagctaggcctgtagtcctagctactcagggagggtgaggcaggaaatagcttgagcccaggagttcaaggttgcagtgaactatgattacaccactgcactccagcctgggtgacagagtgagaccccatctctaaaaaaacagttatcatcatcatcatcatcatcatcatcatcatcatcatcatcatccagggaataaagaccagagtgtaagaattagaagaagagaattaaggaatatcagagtatgctgcacataggaaaggtaagtactgattcctcctacttgcttctgtgccatgggtataatttgcaaatagaactgggttaatgtggtcaaggacaactgaggtggaaacactggcctggataaaagcactttgggccaggcatggtggtttatgcccgtcatcccattacttttggaggcagaggtgggtggatcacctgaggtcggggtttgagaccagcctggccaacatggtgaaactctgtctctactaaaaatagaaaacttagccaggtgtggtggcatactcctgtaatcttagctactcgggaggctgaggcaggagaatcacttcaacccaggaggcggaggttgcagggagccgagaccgcacccttgcactccagcctgggcaacaagagcgaaactccatctcaaaaaaaaaaaagtaatttgtatgtcaataagccccaagaaatcccttacttattcttttcacagatcttttctcaccttcatcctctgaaacttttgcattttttgcatagagaaaagagttgaaggttcaagaaccacatacacaagaggatacgtcatttgcaaaaatatccacagttgccacagaaagatactggcaaaaattctgactgacccaggttaagattcaggatgctgccggtggtggaggttttgtccgttttcgtcgtgataggagctgacagttgaggagagaagggctttgggctgccggataaactccctgcttgtcccgtcttggtggaggctggtgaagctgaaaaagtatggcattgttaaaagacaggtttacaaataaacaagtagaacgtgtaggtgtggtgtagggagagaatggagagattatgaaattgtgtttgatttcagcaaggccgctacagtatcacgaatggggtggggtggagcatagcaggttggccatttattttcagcaaagggctttaaccggatgtgaaaccgttaaagccacaaatgaagaaggtctccccagttactctattaagcacaaagctctaagacaaatcggctaagctgccactgaaattggtttggcccattcacggatataaatctcaacataaatagcgattaaaccaacccccacatggtccagatgtggagaacgggagccaggcttacaaatgcgtatcatctgtttgtggaaagacaccacggccagctcacacgcagccactgcacctgccagggaccaacttggccccttgggaaatctccagctcccatttcaaaggttcttgaggctatgtaaagccaaacccagtaccagatggagtgagggagacgttggtaaattatgtccttctttactgtatttcaaactttcacaggaggagagagaactgtacctatgcctaaggcttttaaaaataccttaaaatgacctacgacctgcttctcccctgcctcatttcacagggttaggacaataaaccacttacgtttaaaaaagcaagcattcataggggccaacaagcgtcctaaagatccttcaaatcctgcccctttgtccttgcccctccatggtactgggactgtcctgttaatgcctcttgggcccatttaaaaacagctgggactaaaggcatcactaacaacaatgacagccaactcttccaagatgagcaagaaacattctgagttgatctggtgctggaaagaaatttgtggatggcaaattggagttaggaactgagactccccaggggcttcgaaagtgctgggacacttgtgtgggcagcacttgcctcagtttcctcacctgacaaattagaaaactcagaacaaggcttcagtgtgttgaaactcacataccactcggctggtgaatccaagtaagctaggcagctctggtgccaggacctgcctgcattactgttaatgtaatatagtgggaaagactccagaagtaaagaggcctggattcaagcacagattagaagccagacactgtggattcaagccccggctcagctgttgccctgctgtgtaaccctgggccagttactggcacctctgcctccctcttcctggcagcagcaaagagagacactaataatatgatacaaagggacaataacagtagctacatctcatcaggctgccgtgaggattaaatcaatcatctgaacagtgcctggcatgcagtaagtactctgttactgtttgctattagagtggttttattttctatttccccattaacctctagggctttggggttatcctctgaaccactgattctcagctatgagcaattcttctctccagggcacactgggcattgcatccagacattttaggagagtggggggttgctactggcatctaggagctagagaccaaaacgctgctaaatctgctgccatgcacagagcggccccccacaagaaagagttatctggccccaaacgtcaaaagtgctgaaactgacacgccgcatagggatggagtaggcatgcagctgggaatccttttcctcatccgggaatgataagggagtgaggatcaatgtcgtcgatctatgtcaattggcgccgagcaagtgctcaataaatattagaaattgttttaagaaataagttttctttgcttttgtttttttgagatggagtctcgctctgtcacccaggctggagtgcagttgtgcaatctcggctcactgcaacctctgcctcctggattcaagcgattctcctgcctcagcctcccaaatagctagaacttcaggctcctgctatcacacccggctattttttatatttttactagagacagggttttaccatgttggccaggctggtctggaactcctggcctcaagggatccacccgcctcagcctcccgaagtgctgggattacagccatgagtcactgtgcccagcctataattaagtttttaacacaataaatctgttttactgcaagaattaatagaattggcctagcacgtggcatgccacattccttcactggggggggctgctatattattactagtcctatcactggtactgtaagacatagaactgaagtgtttgttacacgaagaaacaagaatatgccaggtgcggtggttcacccctgtaatcccagcaccttgggaggctgaggtgggaggatcacttgagctcggaagttcgagaccagcctgggtaacatggcgaagcctcatctctactaaaaatacaaaaaatttagccgggcatggtggcacacgcctgtagtctcagctacttgggaggctgagatgggaggatccattgagcctgggaggtcaagactgcagtgaaccgtgatcatgccactgcactccagcctgggacacagagagagaccctgtccccaaaaaaatatatatacatatatatatatataggcattttaacggaagtattaccaataaaatctttagcattagaatttttaaccttattaattcatttatgttctacctcattccaaaagcaatttgcagctgctcaaatatctgtgtaatagattccccttgaggattaaagaccggggcttctctaattgtattcccataagcaaactggcaaggtctaacagggagggccttactatactatcaaataccctgcttgggactgcagagaacattgacaaggacgtccaaccctaaagggtagcaggaacaaacaaacaaaaacacgcaaagatgctgttgcacgtagaacacagccaagtgaatccattttcctgctcgacaggtcaagtttgtttgtttgtttgtttgtttgttttgagacaaagtcttgctctgttgcccaagctggaatgcagtggggtgatctcagctcactgcaacctctgcctgccaggttcaagcaattctcctgcctcagtctccggagtagctggggctacaggtatgtgccaccatgcccaactaatctttttgtatttttagtagagacggggttttgccatgttggccaggctgatctcgaactcctgacctcaggtgacccacccacctcggcctcccaaagtgctgggattacaggtgtgagccatcacgcccagcctatttttataattctgtatatacattcatgtgtgctaaaaaattaataactagaacaggcctttaatttgatagatctatttcctttgttaataaataaacaagtgttgagatttaagaggtatgttctaaatattaaaaaatggttttaagcatagcacttggatatggcaagaataagggtgtcaggaaaacattggtttcccatggagatgggtctggttcacactctacccagccagtgaagggcagggcccatcctcctaaggcatctgggactgcaaagcttcatggagtcaggaaaaggacatacatgagagtcactagcaacccacaagcctcacgctgcaaaaccctcctctgcatctccctgagaaacaggtctcctatgtccacctcctagtgccaccaatcctacctccccagtgtgtgaaacaccctgcacctgccttgtcctcccaatatcatgaatgccacggccacccacctggtggctcaaggccaaacacacctggatcattctttttgtttttgggggggaggggggcggggagagagatggagtttcactcttgttgcccaggctgcagtgcaatggtgcaatctcagctcacagcaacctccacctcccgggttcaagcggattctcctgcctcagcctcacaagcagctgggattacaggcgcccaccaccacgcccggctaatttttgtatttttagtagagatgggggtttcaccatgttggccaggctaatctggaactgcagacctcaggtgatctacccacctaggcctcccaaagtgctgggattacagatgtttgagccactacactcagcccattcttaattcctcctttgctctcatgcctgaatttacccaaatcttcaggaagaactctgcactcctcttcctaaacatatcccaaatctctgcactcatctccacctcccctactatcaccctagtccatgcatctcaacagggaccatatggcccccaacggggcaaaaataatttttagggggtgaaaaaatcttatcttactattccttttatgtacaaagcactctgtgtgtgtgtgtgtggtgtgtggtgtgtatagacagtacataaacagatctacaatattttcaaatttcatgaaagttcactcttaggtaagtacctatccaaaattgaaaataggtacacaaacaaatccttggatacgaatgtgcacaagcagcactgttcacaataggcaagaggtagaaacaactgactgtccatcaatggacaaactgaagtatccccacaatagaacgttaccgagccataaaaggaatgaagttctgatacgtgctgcagtgtggctgacttgaaaacatgatgctaagttaaagaagccagacacaaaaggccccatattctttcatttcactgaaacaaaatacccagaataggaaagtcagttcaaacagaacacaaattggtggttgttaggggcaggctgtggggtgagaggtaggggtggaagtttgtgggggatggggagtggctgtttggtgggtacagggttttattttggagcgatggaaatgttttagaactagacagaggtggtggctgcacagcactgtgaatgcactaaatgccactgatctgttcaaaatggtaaattttatgttatgtgaatttgacctcatttttttaaaagatctcagggggagtaaataggaagaaaatgtctaaaatggttcagggccggggcggggggggggcaattaaaagactgggcaacactgccctgcctatcatttcccatggagaccccgtaagcacttcccacaggtctccccaccatgtgcacagcacccttcttccagggcactctccacacagcagccagggcagaacccctgaaatgagggcatattgctccatcacctaaaaacatccagaggcacctcattccccagaataaaatccaacgtcctctccaacctcaaacccaacctttcctttctacctcctggaatgtccggccacagtgacctgagggccaccctggaagatcaagtctgttcacacctcaagcctttgtgcctgaggttcccaagggaaggctttcacgcccaccctagatcacactggctcgaattcctccatggtcaggtcccagctcaaacatcacctcctcgaaggcctcccttgttggccacctaaagtggcccagtgcctctggcctactgtctttccttttgacatgaaaatattggccctgaaagagcaggatctgcgctggccagcaggcatccaggatacctctggatgcttatcaggtgcataatacattcactgaatgagcagtgcataaaataattgaagaaggaggtttccatttctcttctcactgctgtagtcatgataagcaataaacaaacaatgacgaggccggtcgcagtgagtctcgactggtccaacacttcgggaggcggaggcagatgcatcacttgaggtcaggagtttgagaccagcctggccaacatggtgaaaccccgtctcttttttttttttttttttttcagaagggagtctcgctctgtcacccaggctggagtgcagtggcacaatctcggctcactgcaggctccgcctcccgggttcacgccattctcctgcctcagcctcccgagtagctgggattacaggcgcccgccaccatgccgggctaattttttgtatttttaatagagacggtgtttcaccatgttagccaggatggtctcgatctcctgacctcgtgatccgcccgcctcggcctcccaaagtgctgggattacaggtgtgagccactgtgcccggccctggtgaaaccccgtctctactaaaaatacaacaagcagtcaggcgtggtggtacacgcctgtaaccccagctgttcaagaggctgaggcaggagaatcgcctgaacctgggatgcggaggtggcgagtgagccgagattacaccactacactccagcctgggtgacagagactccatctcaaaaaaaaagaaaaagaaacaatgacaaccagataaaacctttttcatacaaaaatatcaaacaatctccccaatgttatacacctactaaacacaaggtgcttgctaaaagagtgattaacaatccaaagaagagatatgacaaggccggacgcagtggctcacacctgtaatcccagcacttcgggaggccaaggcaggcagatcatctgaggtcaggagttcgagaccggcctggccaacatggcaaaaccgctctctactaaaaataaaaaaccagccaggtgtgttggcacatgcctgtaatcccagctacttggggggctgaggcaagagaactgcttaaacctgggaggcggaggttgcagtgagccgagatcatgccactgcactccagcctgggcaacagagtgggactccatctcaaaaaaaataaataaataaaaataaagaaacagatatgactaagcagatcacaaaaaaatccaagtcaatatacatgagggtgtgggtggtactggcatggaggccagagatggtgctcagcatcctaggtgcacagaacagcctcacaatacagaattatctggccttaaatgtcagtggtcctgaggttgagaaaaacctgcttcgaatcactccagacatttcaaaagcaaaaagacttggaaatgcttgtttcaattaaaactctgaaacagatgccaatccttttataaagccatacattttgcccaaaggaagaactaattgcctctgaagtcacaaataattttaccagatttcatattttgatgtacaattcacaagtgtgggctgaaacacatcatttattatctacatttacaaaatcctggcctgcgtgaagggttgttctgactacagtaggaaacatgagccttggaattaaattaggaaaaaaatgccctttccctcccatgcaccccagcactctgggtggggtggaaaggcagagtgaatgattcacgctaaatgtcctccagttataaaacctcagaaacaacctgtatgttcaaagtgccgcaccttgcacaactcctatggtgccatgcacagatgagcagagcatggccagatggtctaggatgggtcaggatgtgttggtaaaaatgctgttttgaagggttattcactaacacagaaacatattcagaatacaaggctatggaccaggcatggtgcctcatgcctattatcccagcattttgggaggctgaggcaggcagatcgtttgagcccaagagtttgagactagcctgggtaacacagcaagacatcatctatactaggtgtatagctaggtgtggtggcgcacacttgtactcctagctactcaggaggctgaggcagcggggactgcttgagcccaagagttgaaggctacggtgagccatgatcacaccactgaactccagcctgagtgatagagtgtgaccctgtctcttaaaaaaaaaaaaaatcccagctactcgggaggctgaggcaggagaatcgcttgaacccaggtggtagagtttacagtgagccaagatcgcaccattgcaccccagcctggaagacaagagtgaaactccatctcaaaaaaaaaaaaaaaaaaagtttttttaatgtataaaaataaaaaattaaaaaagaatacaaggttaagctttaaaaaaataaattctacagtctacaccagacattgcaaacaggtgatccatgaaccaaggagtccacaggtgcatttaatgtgatgtagcttttatttagttaaaaatgtgagccagtacataaaagttgatagctgggtgtggtggtatgtgcctgtagccccagctactcaggaggctaaggcgggaggatcgcttaagcccaagagtctgagaccagcctgggcaacatagtgaggaccctgtctctgaaaaaaaaaaaaaaaaaaaaaagaaagaaagaaaaagaaaaagctggagtagttcccattttttttaatttgagggttctcttgaaaaaacagaaatcggccgggtgcagtgtctcacgcctgtaatcccagcactttgggaggcagaggcgggcagatcacgaggtcaggagatcgagaccatcctggctaacatggtaaaaccctgtctctactaaaaatacaaaaaattagccgggcgtggcggcaggcacctgtagtcccagctactcgggaggctgaggcaggagaatggcgtgaacccaggaggcggagcttgcagtgagccgagatcgcaccactgtactccagcctggacgacagagtgagactccgtctaaaaagaaaaaaaaaagaaagaaaaaccagaaatctctcaatacagagcccatactcctatgtggcaagaaccagcaggaggaaaaggtccctggtctctttcagaaaggcacaactctctagctcagcgtcttgggagctcatgacctattagccgtgtgtaacacttatgggtaacatgggtgtgtaaaacttacccaagagctactgactcttctgacacatggtgcatgctagcatttgccctattgtatttccttatgaaagagctgcttatcattgtagcactaaagtagccccaagctgctgtagtacctctagcatgcactatgtatcagaaaagtccgcaccccttgggttaagtgttatacacccatatgcacacaaaagcacacgatgtgtaacaggtatggaaagaaacgtatgtctgctttcattcatcccagtctctacctaccactccccaacctcactcactgccatatctgcctgatccctgtatttgagctttcagcttaacagtaggacttataaccacatataaaaagcgctggaaacacaatctaaggactggctgtgagaggtgagattctcagtgactttatttcattgactgatcgattgagatggagtctcgctctgtctcccaggctggagtacagtggcgtgatctcaagctcactgcaacctccacctcccgggttcaagtgattctcctgcctcagcctcctgtgtagttgggactgcaggcgtgtgccaccacgcctggctaagtttttgtatttttagtagagacggggtttcgccatgttggccaggctggtctcaaactcctgacctcaagtgatccgcccacctcggcctcccaaagtgctggaattacaggcatgagccactgcacccagccatcagtgactttaaattctgtaataaagaactaatttatgacaaaaacatattgatttcacaattataaaaaaaggggggggggagtaatatgaaacctctttttttttctttgagacagagtctcactctgttgcccaggctggagtgcagtggtgcgatctcggctcactgcaagctctgcctcccggattcaagcaattctcttgcctcagcctcccaagtagctgggattacaggcacatgccaccacgcccagctaattttttgtatttttagtagagacggggtttcaccgtgttagccaggatggtctcaatctcctgacctcgtgatccgcttgtctcgacctcccaaagtgctgggattacagacgtgaaccaccgcacccggaccctctttcctttcttaaatggtaactcacagtgtagctaccagaccaaaggaccattagcccagagggtggtgaatgtcaggccccccgactctgaccctaatacatattaataacttacatcgagatcgcgcaaacaaataccggtgaaggtaaccattctggccaggaggtctatataaaggggaaactacaaaaatcactcagaatattaaccacttaggccacctagctagcaagattataggacactgtgagttaaagacttctggctgagcaaagtgcttcttagaaagctaaatatccagttctaaggattataggcacacagctctgagttctccaatcttctaaacaaaaacaagatttctacactgttgtacaagttttatgcaataacatttcaatctgtagttttatgttactggttacaaaactttcactggtgaggctactatattattttctattctatgacatggcaattattttacacgattttgggtgaactactgtcttatctcaattatattatcctgactgtggaagcattttaatacaaatttcccatctccctccactaaatgctattatcactgctaacagcagatggcagtagggtgcagagaaaggaaacaggtatggatgcagaatctggctgtggggactttcacacctcccttacactctgcatggctctcaatttgccttctgtaaaatgactcagtttcttctaatcctcttagtctgtaatagtggttggcaaactatagctcaagggtcaaattgggcatatcacctgttcctgaggggcctgcaagcgaagaaaggtattttaacatttttttaatggttggggggaaaagaattaatagctcatgaaacatgcaacttatatgaaatttaaattccagtgtctggacacctcgggagactgaggcgggtggattacctgaggtcaggagtttcagaccagcctggccaacatggtgaaaccctgtctctactaaaaatacaaagaacatctgggcatggtagcgcatgcctgtaattccagctactcaggaggctgaggtgggaggattacttgaacccaggaggtggaggttgcagtgagccgagatcgtggcactgcgctctagcctgggcaacagagcaagacttcatctcaaaaaatataaaaatttaaataagtaaataaattccggtgtccattaaaaaagtcttaactgtctacggctgctctattttcttctatctagctagctgtttattgagctagggtctcactctattgtccaggctggagtgcagtggcacaatcacaggtcattgtggcctcaaactcctaggcttaattgatcctcccagctcagcctcctcagtagctgggactacagcagcttgtggctacgttactgcaacaatgactaaatagttgcagagttggaaaaaagacccaaaaagcctaaaatacatactatctagcccctgacagaaaagggggcaatttgtaagagtaaaataattttcaatatcactctctcttcctacactacacattggctaattcatgattagtaaaatgacctaagcacataccagcaaggagattatattttaggaaagggactttaaagtctactcaaatgggggattcaactaacttctcacctaaaaagcactcaaagaatgaggtatatttttccaggaagtctgatgtcatttatctttctccttttgtacctcccaagggaagacagaagctaaattaaacacattatccctgttcttatattcctataaaactgaattttttgaaatgtggtgcaggagaaccaatggtcatatatatgccatgtttcattttactagttatgtattaatttcacatatattaggaaaagccacaacaagcaatttaaacacacgagcctatacattgtgtttagcttaggacaaagctgcattacaattttcatatttaagtatgtaataaaatacggcagaaaaccatggcaatgaaagttcaggcaacactaattcacaaagtcgctgccaaggttaaaattttaaacatttcctgaaaagcatgctctttatgggaattaatgtgccgaaggattgtgtaattaagtaccatgttttgtgaacttggcttaaatggaaccgtgtcatgaaacaaagtaagcttttaaggactctggtcagaaacaagggggtaaaaaggaagacttttctgaaactgtgtcaacacaaattatgtcaattccaaaacaaagctctatgactcaaccatgagtgtctaggaccacacagctatgaatcagaactagagaaagatatagactgcagcctttattttacagaaccaaaagccacaggctctctctacccctcctaccaccatctggggagcagctagaagcagttcttgaaaataacccaaggaaaagaaaaaagaaaaaaaatttcccaagaaacaacacaagcaaagtcagtagaattatttgagttcacaactaaatcctcattattttaactcttggggacattcatggtatcctgaagaactgatgcttgctccttaaagaattcctgtgtgaagggagtgagggagagagggagggagagagagagagaccaaggaaggaagcgagtgtgaaaggctgtccaaggctttaggccagaagcctaaagctggtactccaacctgctttattcattctagaaaatcttccaagacatcttaaactgacatttaataattggagattttacttaaaaacctgacatttaagaattggaggttttacttaaaaactcagactttgggccaggcccagtggctcacacctgtaatcccagcactttgggagcccaaggcgggtggatcacttgaagtcaggagttcgagaccagccaggccaacatggtgaaaccctgtctctactaaaaatacaaaaattagctggacatagtagtgcgcgcacctgtaatcccagctactcgggaggctgaggaacgacaatcacttgaacccaggaggtggaggttgcagtgagctgagatggtgccactgcactccagtctgggtgacagagcgagactatgtctccaaaaaaaaaaaaaaacacaacacaactattaaaggatatgacctttaagggaatgggatcacactgggaagacagagtactattattgttttttacctttttttgtttttgttttttgagacagggtctcacaaggggtcacactttgcccaggctggaatacaacagcgcaatcatagctcactgcagcctcaacctcccaggctccggcaatcctcccacctcaactatagtcccagagtagctaggactatagacacacgccaccacgaccagctaatttttgtatttttggtagagacaaggtttttgccatgttgcccaggttggtctggaactcccaagctaaagcaatctgactgccttgccctcccaaagtgctgggactacaggcatgagccacggcgcctggtcaagtattattttttatcatatgtgtttctctaagatttgcactgtttaatatgaatgtagggttttgacagaaaaatacaatttcaactaaaacaaaattatttgtgttatggaaagtcaataatccaaaatgcagcgacatctgaacagaactccacaagatttctggccatctccatctacttctaggtataacctccaggtggccttttggggacacttttctcatttctgggttactagcagcaagaactccactggtgacttcttgaaaatctgctctgtggccccctacagttccccacgattgcttgatgctcacctgcttgggcccaccaagtgtgcacccatgggaaacccccgtgtccaaggggcctcctccccgctcccccgcacggagctgacctgtgctcttatccaggaagtccatggactcctcgctcgcactgaagtggctcgacgtggccttcttctcagcatcctgctccacgtcggagcccgtgtgcacagaagagtttgtgctcatgggggagcgcggcatatccgacaaggaaatccggcggcctgtgcccccactcagcacaggcttgctcatcaggatcttgggggatgccgtcatgtcaaagttgagcttgaccttctcctgcttgtctatcttggcagtgccggcgctggggttggtgggatcgagcagcatttgatactggctgttgggtgtgtagggtgtcctaaatggagagtaattaaaaaccccaaacttcctgcggatgttctccacgtaaacctccatctcttgcatggcactgttgaagatgctcttagtctttttcacagaaaaaggaatttctttagacatgaggtagcaattatttattggaacccaggccctagaagggcaaaagataaagagagtttaagtcaacttcagtaatttccaagattgcttttttcttgatgtgaaccaaattagccaagcatgtttgccaagattcttattctattaaaaaaaaaaaaaaaaaaacttggtttgaaggattaattaatgatccatttaacaagcatgttctaccataacagaacatgaacaacaaaacttcggcgaaaacatttaaaagtgcaacagacttagtcattgtgagccactaaagaaacaatcctctttggttttctcttagtagagaaaaataaatcagccactgcatctgacaacacctctgaaaagagacttattcctcaggttacactcagacataaaaagcttccttttcccattgccatttgaaataggaacagaaggaaactttggaatactgcatccctaaaaggaggtacatgtttttgaatgtaagataattcacacagaaaatcactgaaaaaggagcccattcgcctccaggcgtgcactttccacctcccatcccaggccagttccatcttcctaacatccatatcccacattccaattttgctctgcaaagacccatgacagcatgtttttgcagaacaaacaatgccagcagcagcttttctggaaccagagccagtggcccccgggggaggtgcaaacaccacaaccgctgctgcgggtgaccacgcagctgatacagggacatcccagaaataacttggctaccatgtatgatctgctggcctcaacccagtttctggctggaaaaactggcgagaataagctttccaaggaaggcttttgtgggggattttttgtttgtttaattaattcattttatttatttatttatttatttatttatttatttatttgagacagtctcgctctattgcccaggctagagcacagtggcatgatctcagctcactgcaacctccgtctcctgggttcaagcaattctcctgcctcagcttcccaagtagccagaactgcaggtgtgtgccaccacgcccagctaatttttgtatttttagtagagacggtgtttcactatatgttagccaggctggtcttgaactcttgacctcgtgatccacccacctcagcctcccaaagtgctgggattataggtgttagccaccgtgcccagtcttttttgcttgtttttttaagagacaaggtttccctctgtcacccaagccagagagcagaagtatgatcaaggctcactacagcctcaaactcctggactcaaggaatcctcccagatcagcctcccaagtagtggaagtacaggcacgcgccacaacacacccagataattttttaacttttgtatacttttgtagagatggggtctcgctacattacccaggatggtcttgaactcctgaactcaagcaatccttccaccttggcctccccaagagctgggattataggtgtgagccgctgcacccaacctccaaggtggccttttagatttcacagaccacaaactgaagcccggtagaaagcagtggggagcaaaggggactttgcagaagcagaaaactcacgtctggtggaaagggagaaagcagtatctactcagttgctatccaaagcaaccatgtaggaatctggacccaacactgccacgttttccaatattttaaagagaagaagacaaaatagacttcttatgttacattttacccccatttcaacagttggcatctaagagaaaacaacccaggagaaataaagcacatccctgggaccgaattcacaatacaggcggattgtttgcaagtctcggtgacaccagatcgtaacacaaactaaaactaaacaccccaaaaatatcgatctgctctatcagagggctggaaatcaccagcttctcatccattctgactgctgtctttctcctgagacctgaagaaccatatctccaccaagaggggcagagcagaacagaagccagatgctctcaaggtaagagtttgcctcacggtgagattctgcgttcaaagtgagcgggcacagatcaggactactagacaggacagatctgagaaggcatcagggtctccagtgctgtcctagggcaaatgactcccccttcctgagctagcctcagctctgtcaccgagaaaaaggagagtgagtccttctctggagaatcaagaggcagggccaccaggagcttatcaccagttggtcctggtatcataacctcgcccccctgacctgctccacacccacctcacccacacacttctgtccggtatctaaggcgctcactgttcccttcccccaactattttccatgaaattgcttggcagggaaggaaaagagtctcttttctttcaaacaagtccaaggctgggcatggtgactcacacctataatcccagcacttggggaggcagaggcaggaggatcacgtgaggtcaggagcttgagaccagtctggccaacacggtgaaaccccatctctactaaaaatggaaaaattagccggatgtggtggcacgcccctgtaataccagctactcaggaggcagaggtgggagaattgcttgaatgagccactgcactccagcctgggcaacaaagcgagaccccgcctcaaataaataaataaataaaacaagcctgggtgacagagcaagacccccctcttaaataaataaataaataataaaacaagcccaggaagtatttcaagcgaaattagatttgcttgacaaaatagagtctctgcgggggacaatatctagtttcacattatctcacatctaaccccacggtggcttctccctagctatgtgaccctaggcactctctgaccttaagttttcttattgataaaatagacataaaagcagcttctacaaaaaagcacttaaaacactgcccagtacataaaaggcaattggttggtgtccgcttttttttttttttaactctgcaggcatttaataaaatatttcctatatttttacataactgtgcatctataaaacaaaaccaggccaggcacagtggcttacgcctgtaatcccagcactctgggaggccaaggcagatggatcggttgaatccaggagttcaagaccagcctgggcaacatggcaaaaccccatctctactgaaaatacaaaaaattagttgggcgtagtggcacatgcctgtagacccagctacttgggaggctgaggcaggagaatggctgaatccgggaagagaaggctgcaatgagccgagagctcgccactgcacacaccagcctaggtgacaaaccaagactctgctccaaaaaaaaaaaaaaaaaaagaatggtggtcagagactccctgcccaaagcctactaaaacatcccaagacctccaaagttgtttctctaccactgtggaaggtcctgaacaactccctccaggggatcccctctcccaaaacaagcccaacaacacggtgcactcccttaaagcaggtgctgagaggggcttcgaaactggtgaccatcagacccatgctgctttctttttcacaaacagaagggggccagcttccacgacagctctcatccagaaccaagacctaaacacacaaatggttttgggaaacagcttctgcacacagagctggccaactcacacgccgtccttcatgctctgtaagccaccttcagtcgctgtctgacgggtgagagatggaggtccctgcagagcagtcacagctgagagactacagccatcaaccataagggtctgggaatattgggtgcaagggggtaggtattattttttcccatcctgcctgtgtcctaagtatatctactcatactgtattactgtatcaacctatagagtaagaatctcaaatcatcaagatggttcacatttgtcatgctctgatgaagaggagggatgtacagcctgtcaccaattcctcctgctcttcaaataaaaaacaaactcctgcctacccctctgactccagctgtgagcatcctctcctccccgaccctgtttaaaccccactattctcccagcatttcctgaaccctctcagcctcagcccttcccctcccgacctctgctcttcctggtccctcatcccagatcttcacaccaggcccccaccactacctcctgacctgagattatcttgcctattagttcacttgtgtatcatccttcttccccgctaggatgtcagccttcacatgggcagaaacatttgaatcaccagcttccactacacaggctggcacgcagcagtcatcaaatatgtatttctttgaatgaaggaatacaggaattaaagtcaaggtgcaatacttcctaccaaatccagcaccatctcaataatttccattttgtcttctgacagtggaccattgggattcctagtaaatgagtttgcaaatgacttgggaattcactcttttggtctgcaagacgactagcaaaatttaacaggggaaaccaattttcagcttctggacactctgtgtgtgtacataatttgtagtatatatattttaagtagtctcgctacatactaacacgctttctcaaactgattggtagggcttcaaaagggtctttgccttacttaatcataacttgataaaagagaactaagatattaaccgctgctcatctctgcctacctgttgttctcaagcacacagcaggctctgctctacagggaactgctattagctggaataattcactctgccgtgtacggagggaaaggggagggcaggaaggctgggagggagggctcacacctgtcaaaacagcaaccccttataacttcccactgtagcttcagagaaaagggaacaggagagaactactcagcatgatgataagagattcatttactggcaatctaggaaactacttctattctttgaaagaatgatttggaaagcagtttccatggaggtttaatttacttcagaaaccccctcccaaaaaatcaaaccaaaacaaaaaagaacagcagcacttcaaacagccacagaacccattccaatgttggtttcatcaacagacccagtaaagtaagatgattttctaacacacctgagaaaactgtagcccacgccattaccaagcttaacataccacaggaaatttatttcaacaacaagatcaatggttggtatcatgacaataatgagaataatagctgcagcctccacttcttttcttatctcataacagtatcaaagttcagtgaaagctacatgttccaagcctgttattaactcccacctgtcatgttgtccaaagaatcgggcatcgacctgcccgtctttatcccttagagcttttgcaggccagaatggaaaccccttcagtttggcccagaccaaaggatgtggattgctctaggaaaagaaaaacaagatccagagtttgtacatatttgacagcaagatactcactaaagtttggtatgtgaggatgaagcaggactgtgggacacaggccatgagtggaaaaagagtttcaagcagggtcggcctgtgtggtattccctaaaaggtatgtggccaagacacctggacaaaactgcaaatggagttaaatggtgaaatcaaaagctgaatgaagtccaggcatggtggctcacgcctgtaatcccagcactttggaaagccaatgcgggtggatcacctgaggtcaggagttcgagaccagcctggccaacatggtgaaatcccatctctactaaaaacagaaacattaaccaggcgtggtggcacacgcctgtagtcccagttactcaagaggctgaggcaggagaatcacttgaacgcaggaggtggaggttgcagtgagtcaaatcacgccactgcactccagccagggcgacagatcgaaactccatctcaaaaaaaaaaaaacaaaaaaaagaaagatgagaaaaccagggttggattctagctgtaccattattatctgggcaggcacgagcaagacatttcacctttctgtgcaacatacacagagacaatgacaccaataccttctgtttttggattaaatgtgcatcatacctagcatctaataaggggcagtattttgctacctttattctttattgaaggcttagctattccggtgttaatctccaaaagcacgaagagatgcaaagtatattttctcaactttccttgcctaatcttgcctccaaacccactccaacccaccaaccccacccccaacacacacaccagtgcagcccaacaatgtacttctctctgcagaaccccagcttggagaaggcagatccacagggaaactagggtgactttatttcccccaagaatcatgttttggagggactatggagttaatccagggaagtattttcaaacctcttaaaatagaaccaacatgatttgtaaatccacactgatttaagctcatcttattatctgaaaagctttgctgcatcccacatctctgatgagctctcttttatgctgcaccttgcagtctgcccaggctaatcaacccaggaagccatgatgctatctctggcacatgaactttcagcctaagaggtttatcctacctggattactttccttctgccataattttatcagcaaaaaattatcttaaaactccatccaaagtttcatctaataagccacctggaaaaagctgtctcagggtagtcatccaaggcacagggttcagtaaatgaaataagcaaagtaaatccaacttacacaaggctcacaaaaccagttatctcgtttttggcaagcagctagataacattctggacatacttcgatttcattcatctgtaaagcaaaaatacattagaatgtgtcaccccaggggtggatatcttgtggacctcaatcaatgcttgatgattttgaaggttaagatgttttaaagtcccatagagggaacaccttggagatgaatccaaccactatgtatcgctcccaatgcttccacccagtccaagccaccgtcctttctctctggaccaatgcaacagctaactccccacgtcacccacttccacttttacccccattatagacattccctgcagagcagccacagccaccattttttttttttcctccagagtctcactctgctgcccaggctggagtgcagtggcccgatctgggctcattgcaactttcgcttcctgcgttcaagcaattctcgtgcctcagcctcccaagtagcagagattacaggcgtgcatcaccacgcccagctaatttttgtatttttagtagagacagggttttgccatgttagccaggctggtctcaaactcctggcctcaagcgatccacccgtctcagcctcccaaactgctaggattacaggtgtgagccaccatgcccaacccagagccaccttttatagacataaatctgttcttgtccttcccctgcttaaaagcccccagtgacttcccattatacccagtagttctctgtcagagcactttaaccattccccccacccacagggatcacatagcaatgtctagaggcatttttgattgtcacaagtagcccaaaggagggatgcgggactactgaaatctaagatgtacacaatagtccctgcaacaaagaattctccagccctaagtgtcagcagtaccaagctgagaaactaacaatgaagtctaatgacctgacaggttccctcaaagccacatgtgatctggccccagcccacctgtctcggctcaccttgcagcagttccgctccccaaccccttccagccactctggcctgctctgcttgccaagctcaattctatgtccagagtagctaattaataccatgttgccctatttcagctccactgacgacaatccgaaaattcaattaacttatttattgtccttttctctcataagaaagtacattcccctagaataacattgtagcttagagccaaagatcccagaagctcccttcttggatctcaagtcagactccaccatttactagctctgtgactttagggtaagctgcttctcttctcagagcccccatatgttgatctattgaagagaaaaaaaagcagcacccaccacaaagggctgttataagaaattaaatgagataaatgtaaagtgcttcaagtgacagagtaatcaatattgcccattaacatttactgaagacttagagtgtgctggtatcattctaagaattctgtaagtattaactcattgtattccttacacctcatgagattaaaaaaaaaatgaggccccaaaaagtttagtaacctgcccaaggtcttacagcaacaaagtggcatggtcaggatttgaacccaggtagtcgggctccaaagcccatgcaggtcaccactgcactgatatttgttattcctttctaccactatctgccttattcttctctttaactcttatcatgcaaggtgccacatatttaacaggtgctcaataattataagactaacagatttcacaggtcagcgagtaagtaagcgaatgaatgtgcaaacaaatgcatggatggcagagtgcacctcctgcttctaagcccactctacttctgagctattccaaaggaacatatccaaaacagcctgtatgactttcttcaaggaaatgcaaactaaaatcacagtaagatgcctaccgtttttacagatcacatcgttggggcaggggggcacatatttacatatagttttgtaattacaactcccaatattggaaaggacatagcctcattgtaactggaacatctgacatgttcacagcctcatagtagttttattcctaaaaattaaactaaggaaatcatcaaatgcgcaatgatattcatcaccttgttacttaagatgctgataaaactgggtactatttaatgacaagaggagtaattaaatgaatgtccatgtgttgtatgtaatactatacagccatgaaaaattctgttcttcctacgagtttaattacctaggaaacagagaaaatacataaaataaactaagtgagaaagcagtttataaaactctctctacataaatatacagacataagccgggcttggtggctgaggcctatattcccagcgtctttggaggctgaggcagaaggatcgcctgagcccaggagtttgagaccagcctgggcaacatggcaaaaccccatttctacaaaaaaaataataataattaatttaaaaagaaatagccaggctaattaattagctgggtgtgatggtgcacccagtccatgttgagaccctgcctcaaaaaatacatagataactatatctatatatagatataaatttataaggatagattttttttttttttctcggagacagagtctcactctatcacccagtctggagtgtagtggtgctatcttggctcactgcaacctctgcctcccaggttcaagcaattcttctgcctcagcctctcagtttagctaggattacaggcatgttccaccatacccagctaatttttgtatttttagtggagacggggttttgccatgttggccaggctggtcttgaactcctggactcaagtgatctccctgcctcagcctcccaaagtgctgggattacaggtgtgagccactgcacctggccaggtatctatctatctatcatctatctatctatctggatatatctagatctagatctatatatccatatataaaaagacatggatgggtcccagtgctatctgaacagtttttctttatgaatgaatgggagcacactgacaggttgaaggtcattccatctcatttttttattctcacaatgagatctaataaagaaaagctccctcataccattttggctgccagcctgtcccacaaccaccagagcctcacagctcacacgcctaagaggtctgttccatccacgccatcacaattatgggcatttgcaagaaaacaggttctcctggacacctgggccactctcccagaagcagtcaaggccatgcccccagatatcaaatcctcttctgcaagaggaccaaaagggacctgaaacaataccaggctgtggggccaaggtcagaaattacgaattctatctaggcaatcaggaaaagacaggaggcccggtgcttactggtgactcaagggtaaaaaacaaaaaatcctttccatctcccttagatcattgctacagtaagggtgttttataatatactcgggcccctctttgttctttttactttccttgaagagtaggggtgtggcctcaacaaattccaaaatcacctcggctacctaataggagattctgcaaatggaaacttcagctgccccatcccctccttctgggtgcatctaaaacaggacagtgggaaacacatacctcatgttcacagattttgatgactactttcgctatttgcgtcaatttgtgatttcctaagggaataagaaaacaggattaattctaatggaaataccgcaacaccgggcctggggactttacttccgctaacaatgtgtttacttgcttttcccccaggattaagcttttaaaggctaaaaccagaggttcctggcttctaatagtaattcacattatgtgattcctcccatcaatgtcgacgactctttggcgcctcgatgtcatcttctctgcaactgagcaatttatgtgggtttccctagagatcatggattaatattcttaaaatgctttgacattctaaaggctcaaattaatgaaaaaaggccttattctacccattgtcccagacgccaacccaagaagaatacaagagaaagaagacattttcttgaatagctctggtgtggctagtgcttcaaaacacattttcttcttgggccaagtgtggtggctcatgcctgtaatcccaacaccttgggaggctgaggcagagggatcacttgagcccaggagttgaagaccagcctgggcaacatagcgagaccccacctctagaaaaaaacaacacacacacacacgcacacacgcacacacatacacattttcttctcagctcctcaagaagtcatactaggaagcagggacaaaatgtgcccatttaatgaatgagtatgccaaggttcaggagtcaccacttacattacttagctaataaagtaaccatctagccccaggtctaactctacactaaaccagacgacaagatggtccaaagtcatgttttctttgaactttatggtatttttagaaattgtaaatttgttgacacgaagatttcacacacacaaacacacaatatacctacatttctggtttgccttgaaaactcagaagatccagtaactataatcaatggagcactggagctgccaacagcgacctttccaggccaggtaggagttttctgttctccatgatccacagcacatcacttgacctgcagccttcttggcttgtgctaatgtttttgttcttctacctgacctcatccacttgtttatataatttgataggcggggcctttctatatatttgagtttataatctttacaccaattcttttttttttttttttttgagatggagtctcgttctgtcacccaggttggagtgcaggggcgcagatctcagctcactgcaacctctgcctcctgggttgaagcgattcttgcgcctcagcctccagagtagctgggattacaggcatgcgccaccacacccaactaatttttgtatttttagtagagacagggtttcaccatgttggccaagctgatctcgaacccctgactgaagtgatccgcccgcctcagcttcccaaagtgctgtgattataggcatgagccactgcacctgacccacacattcttaatgcctagtgcctctcctttttcccctccttgcactctcagccctgctatagttagtaatgcaatatggtgcgtaaagcagatatgcatatatctttccttaaacactagcaaacaggctggcgtggtctctaatgcctgtaatcccaacactttgggaggccaaggtgggcaaatcacttgaggtcaggagttcgagaccagcctggccaatatggcgaaaccccatctctactagaaatacaaaaattagccaggtgtggtggcacacgcctgtaatcccagctactcgggaggctgaggaacgagaatcgcttcaacccaggaggcagaggtttcagtgagctgagatcacaccactgcagtccagcctgtgcgattcagtgagactctgtctctaaataaataaataaataaataatcctatttttgcaatgaacaaaatatctgaatagatgtttacaaaaaatgacatacaagtcactaataagcacaggaaaagatacgcaataccactgatcattaggaaaaggcaaattaaaacatcgtgacataatactttacaccttcaagaacaggtaaaatttaaaaggcagacaatatcaacccttatagtgtgtggagcaaaagagaactctaatataccctgctggtagaatgtaaaatgatagaaccactttgcaaaaactgtttggtgaaacgtagtaagttaaataaaatcctactcactgagctggcaacaccactcctaggtatttacccaagagaaagaaaaacctatgtccatgcaaagacttgcacaagcaggttcacagcagcttattcctaacagcccaaagctaagaacaacccaaatatccatgagcatcaacaaggtaaatggatgaatggcggcatattgatcgaatgaaaaaaaaaaatcagcaacaaaaaaaaaggaaccactaataacacataacacagatgactcctcaaaatattacactgcatgagagcagccagacacacaagagcactaactctgactccatttatatgaaattctacaagaagcaaaattaatctatcctaacacaaagcagaaagtggttcctgttgagagtgggtttcctagaaaatggcatgtatgagaatccaacaggctgataggaatgttctggatcttgtggttacacatttgtcaaattcagtgaatataaacataaaatctgtatgttttattttatgcaattatacttccattaaaataaggtttgtagaaataacactaaaaggcagcagcaccatgcagctgcaagccactttagatgtcagctcataccttaaaatgaacttggtcactgcctcctattcacatatattagcacaatctatacgcaagtattctcaatatgaattaagagcctgatttttcatgaaggacaggaatttgtgcaacacatacacagcatactctttcttaggagtcatctaagccactcacccccattataaatgatgcagttgtgcaaaatccactttgcatcagccaggaaggcttctgtgcagccatacattttctttttcgcattctgggaagaaaagcgatggagcataatcacagtgagtctagacaagccacagtcagtgactcttgtgtccccacataatttttgtagcagtcatttgccaaatcaattagtgttcttctattcatttcccaagatgcttctttttaacctacaacaccccgactaaagaatgcttttatttttgagatctataaccctataaaaatgcactctttgaatttaacacaataactggaattttctcatcttatagtagctgtcatttatcatgtagcttcttccaataaacaggatagtttatttatttagttttttttttttttttttttttttggaggtggagttttgctcttattgcccaggttggagtgcaatggcgtgatctcggctcactgcaacctccacctcccgggttcaagcaattcccctgcctcagcctcctgaatagctggaattacaggcgtgtgctaccatgcccagctcattttgtatttttagtagagacggggtttctccatgttggtcaggctggtctcgaactcctgacctcagatgatccgcccgcctcagcctcccaaactgctgggattacaggcttgagccaccgcgcccggccaaacagggtatttcatatatttatacattatttattattagtcatatggtctcacacaaacctcacaataatttaatgaagtacttattatcatacccattttacagaaaggcaaactgagatacagtaatgttaaggaatgtatctaaagttccacagctcttaacttaattaatataaagtcaggtttccaactccatctcttttgaatgcctccttttttccaccacaccatgaaggtatgtgcaatttcctaaaaacagactggatttatggtttgggagttattggggaagacaatatgaagtaatgtttcttcctcgtggatgcatttcactgcccatattttgctgcaaatagttggaaaatcagcatcagaataatgtgcacaatctacagtgttccaagtgtaattttcagcgtggaattttagcatgaacttttaaaaccttcaggcattcaagaaaaaacctaatcagtagagtaagtcaaattctaagaagccacatctttattgctaatctggaggcttcccagacacttaattttctcttcttccttcctgctgctctcattagcacctccgaaagaaagaggaggtaacgctcaagtcaatcaaatcactaactcttagaagctatggcttttgcaggtaaaaagctagaatcatcgcaaaagtattaccaaagaatttcaacattccactgcaatcttggaagaatgttacaaaggaaagacgttagagaatcaagagttcttctatccaaataaaggagcaatgaaaatatagagaaacaatttaagattgttatgtccaacttgtgatagagcataggcagtgagggaagagccttaggcatctcaactgtgggctagaatggtgaggttctttgacggaggccaaccttttccaatgtacaaaggtccattggatggaagatgtattccgcatagtcagggtgctgttccaatggaacgggcttctggaatgcatctgtctataaaagagaagatatgcagaggaacgaacccatcattactatggaaaaccaagcattaatgctaacaaaaggcttgaaaaattgagacaacttttcagacaatatagttctaaagttttccataaaggatgaccgtggggagctccaaattggtctaccttctaattctgcctggttattgataattataagcccaattgtgatccaattttattcttggttttcaatacacactcaagaaacagatcctgtcctcttacattaagattgacaattacaatacgcactgtaagttaaaaagatgctttaacaaaatcagcactttctcccctgactgatttgacgttcaacgatttacttgagaaattaacgccctcttcaatttttcttcttggtttttaattctatggggctgacaaatctacatgactcattctttttgttaatagtcattagcacatataatttagcctatgaaaatcgaaggtaattccttgccacactcaacataaaaattataccatagcaaaaaaaaaacaaaaaaattgtgcaaaccaaactaaggctacaccttttgcttccactgattgagattttgtttaaaagagtccaatttgttaaaggttctcaattgaaggatatccaatcagcatgctctaaattttttttatcatctcttcaaaatttcagaatataatctcaaagcaaaagcttcttttttttttaaagatataaaaccacagtgattagccccaagaatctacatttctgtacagtactctcaggagttgtacaaagggtcaccactagcccctatggtgcctttgtgcaaatcaggtagggggcatcatgtccgcaagtttctcttcatctgtaggggccaggcgccgtgactcatgcctgtgatcccagcactttggaaggctgaggcaggaggatcatttaaggccagaagttcaagaccagcctgggcaacatagcgagaccctgtcattacaaaaaataataataataaaaaagttagctgggtgtggcggtgtgtgcatctatagttccagctacttgagaggctgaggtgggaggatcgcctgagcccaggaggttgatgctgcagtaagctatgactgcgctccagcctgggcaacaaagcaacagtctgcctccaaaaaaagaaaggaaggaagggagggaggtagggagggagggagggacgaggaaagaaggaaggaaggaaggaaggaaggaaggaaggaaggaagggagggagggagggagggagggagggagggagggaggcaggcaggcaggcaggcaggcaggcaggcagggagggagggagggagggaaggacagagggagggaggaaaggaaaatattcatctatagaaaaaatgtcataatatgcttattatattgtcaaaataatactatcttcaaaaacaagttatttttctgccattttcctgaaaagtattgtgataaatatacaaaccacagtggccatggtttgacctgggactcacaggtgaggcaccactgtgaggtacacaactggccaacccttcccccacatgcagattttcctcaaggggcaaaggctgtatatcaaatctcatctcaaaactgaaggaactaaccaaattctcaccctctacagaaaagtcactggttgagttttccttgaaggttccatcatcagatctgggacataaataaactgtgttgtgctcagcttcctcattgaaatggattttcctaactcccatgggaaggagcacaaagctccccttgctgggtgttataggaggtttcactttgcaaccagtcagaattttcaatccccctcaacgttttactatgtcattgcccaattgatatggtttggctctgtgtccccacccaacctcatctcaaattttaatccctacatgtcaagggaggaacctggtgggaggtgactggattatgggggtggtttcccccatcctgttctcgtgatagtgagtgagttctcacaagatcttgtggtttaaaagtgtttggcacttcccaccccccttctcctgctgccatgtaaaacgtgccttgcttccccttcgccttccaccatcattttaagtttcctgagggctccctagccatgcagaactgtgagtcaattaaacctcttttctggcgagccacagtggctcatgcctgtaatcccaccatattgggaggccgaggctggaggatcacttgaggtcaggagtttgagaccagcctggccaacatggtgaaaccccatctctactaaaaatacaaaaaaaaaaatagccagtgcggtggcgggagcctgtaatcccagctactggggaggcagaggcacgagaatcacttgaacctgggaggcagaggttgcagtgagccaacatcacaccactgcactccagcctgggtgacagagcaagtctccatctcagaaaaacaaacaaacaaacaaaaaaaaaaacctcttttcttcataaattactcagtctcaggtaatatctttacaatagtgtgaaaacagactaatgtaccaattaaactcctctgggacatacagtgcttactacgacagagaattaactgaatggcatcatacctcatgtgtgatttacacatacttgaatttggggatgcaaggaggcccaaagaatacatcaggtacctaaaaagctaagctattaacagaacaaaacatatgtcattacgttcatttacgcgtataccaagaggaactttcttcttacccctggctgtttcattttctgaatggcaaacttgagcaggtaggataactgttcaatggtgagcattgtcatggctttactctgggtctcgatgcattctgctactgtaattttctacaaagtcaaagtcatacataaacgtccggttagaaaaaagaaattaccatccatgtactgatttctattttttcagtcaactgacagacaaaaagcaattctcatcccaatgagacttgttgtttcacttagcaaagactcctggaacaaaatgtaccagatcagtgggtaactattaaaaagcgtatcaatctatttccttatcaggaagcatttttagctcaggaagacgacatgatctgagaaaagatgtggctaaacaggggcctgaaaaatcatcattattataacctttaggtttcaagaatgggatatgaaagcaaaggccaggtgggcgtggtggctcacgcctgtaatcccagcacttggggaggctgaggtgggtagattgcttgagccccagtgttggagaccagcctggcaacatgatgaaactccatctctacaaaaaaatacaaaaactagccaggcatggtggcacgcatccgtagtcccagctacttggtaggctgaggtgggaggatgggttgagcctgggaggcggaggctgcagtgaaccatgattgtgccactgcactctagcctgggtgacagagcgagaccctgtctcaaaaatatgtatgtataaaaaaagaaagtaaaggccacggatgatttcagggtgattacttcacaggatgggtacttatcaaccatttatcctgatcctcttaaggttctgggctgtcattcaggaaactgacaaggcattaattcaatgacatcactgatggaaagggacagacttccctgcagaaagattacaagggaaagcagtggactaataatacgtatgacttcattgtccatctcccttactttgaacccacctaaggcactgtgtcaaagtacacaaggagcacaacctaacctaactgtctatctccatgggtaatagatatcagctcctaagggaaattcccatcaaagaagagacccaaaggaacgtctgaaaccagattctgctatgtaaatctggtactacatcttaaggcttcagaatccttatgtagcagcaacaacaaaaatagcaaattctgatcatgtcaggaaacactctttaaccatctgtgtagggagagctgagaaaagttttctccaattaatttggattctgtttccatttttcacatctctggggcctccaaaaggaactctcagatgtgtctcgttggttgtcgaggaaaaggccaacacaagagtcactcagaagctgaaaacagtgcatgacgcatgcatctatttgcttagctaccacagccttgcaacgttcagtcttcccagttgactgccgtaacaactcatccctggaagaaattcagagccccgaatcttagacacagagcacctgtttgtttgattctggtttgtttccaggtaacttatccatggcaaacacttgggctgcctgcccaactatcattcattccctctcaccccccactccttcttcctggctggcagtgcctggttcccacaacacaaaaagcaccacatatgcaattttcaaggcttttttgtacaaggactggtgatgcaatactgaccaatgagcccaggggcaaatcagctgggggatgatggacaaaatctttctgcttgataaaaagagatgcaaggagagacatcctccttttgggagaatttttgtctatccacacataatacctgaaccctagcagtcaacttatggccatggagaacatgtcacctcaacaatgagatggaaagagtctggctctgaataaactctggcctggccctgcctctaggttctgatgataataaatccacattgtttcagcccccttctatcaggaactagtgcttgcattaacaactatattttgttggccgggcacagtggctcacacctataatcccaacaatttgggaggtcaaggtgggaggatcgcttgagcctaggagttcaagaccagcctaggtaacatagcaagaccctgtctctacaaaaaacttagtaagtagctaggtgtggtggtgtgtacctgtggtcccaggtactcaggaggctcaggtgggaggatcgcttgagcccaggtggtcagggctgcagtgagcaagatctcgttactgcactccagcctgggcaacagaacaagaccatgtctcaaataaaaataaaagaactattatttgcagcaaaagcatcctatcagagctgctgtcatctttgtaatatcattaaacaattgggaaaagttggccaagactaaagaaaattggtgaaggttccagatcccatgacaaatgtagtagaatgaggtcagcctctgcgtgcagaggagggcgccgctgtacaatgcaaaccctacatatttctccatctagagtaacccaaagagaacggcagccgccttttgccattttagagaggacaccattacaatatcatcgtcatcatattgatttcatgtctactttctttttatgtatttcttatttttctcctctccctacacaaaagtatgacagacactgtcctatagctggcttttttccctactaaagacatctggatgatctttccatttcacacatagaaagcttccacatttgagatcaaactccaatgtaccttttttttttctttttttgagacatgatcttgctttatttcccaggatagaatacagtggcatgattacagctcactgcagcctcaaccatctcggctcaagtgatcctccaagctcaccctcccaagtagctgggactacaggcacataccaccatgcccagctaatttctttaaactttctgtggagatgggggtctccctatgttgcccagacaggtcttgaactcctgggatcaagcaattctcctgcctcggcctcccaaagtgctgggattacaatcatgagccaccacgctcagcctccaatgtatctttgaatccaagagacattccacattaaataattgtggagatgacatttttattttcagcaattccaaaaaaacatcagagttgggggtctccaagaacaggagccacctccaaacagtggaaaccctaatagttggcttaataaagggtgcctggggtttgctacacaggaggcatacacactgccccgactacgcccatgcactgctgcctccggccgtctgcctggaagttgtcccccaaatggctgcatggctcactcctctctttcatcaagtctttctcaaattttagtgaggctttcccagaccaccacattcaaaatgaaaacaccttgcactcccttggacctcctattcccatcctgaatttgttttcttcacagcacttttcttttaattcattatatggaactttatttattttggtttttgtccttttctgctggaaaaaaaaaaatgatccatgcctgtttttgtgcactgtcgaattcccagcacctaataggcactcaagaaatacttgttgcacaaaagaaagcaccagacggccactacagggaacatgcaaccaaacgtggtcttctcagcttggctactgctgatgattcaatgatgcggcaggcaacaacatccaagacggagaaaacagaatgagatcttttcaaaatgtgtgagccgttcatgatttgggagttaactttcaaaaagttcatcatagaagatgcagagatgacgactacagatctccaaggaatccaaggactcatgagaaatcagaaataatattccgtgcaattgtctttccaagagctgcagtactgcagccactgccggtgttggtcaagaagggggtgaccaggatagaacaggtggaaagcaagaaatttctcttttccatctatctggattatttgtaaatttaaaaataaaaggaagaaagagaaaggagaggaaacgaggcaggtaatgcattcattcatcaggaactaacctcacattcaggacaaaaccagtccccctctggttccgatgtcagtctcagacacttagcgtgataaacccggggacagagctcacagcaaaggacttggccttcccggtgacaaacccagcagtagaaatcattccgtccatcctgcggtacaacatcaacagggtctgtggtgagtggctgcttcatatagtaaaacggaccatgtcttagttctgactgaaatgtaggcaaaaagacaggtttggtttcaaaacaaatgtgcattctcaaaaggaatttgaacaagtacatcaataacaacaaaagaaaataacagcatttcacaaattcattaaaaagccaaactatcttaggttactctactaaatatataattagcaagttgttaaaattatgaggatttttcttttttctattttaagaggccacgattaaaagctggtatctaagagttacaaggcagccctagcagaatggcacattgcctataacccacatctacctaggttcagattttaactctaccattaaccaggtgcatgaccttggacaagtctcttaacctctcagcttcaattttctcatctgtaaaatggagatgataatgcctaacacttcatggtactgtgttgctattaaatggggtgatataatgtatgcctgtttatcaaaatgccaccatactaacaatgctaatgtggttggaagcccaacttatggaagtcccaatttacaaagccaataaaagcatagtagtttgccctgggattcttcaaatggcagacatttagagaatagatcaatagggtttcagtcaccaaaaaatggttacctaattttttttttctttttctttttcttttttttcagagacggagtctcgctctgttgcccaggctagagtgcagtggcacaatcttggctccactgcaacctctgcctcccgggttcaagccattctcctgcctcagcctcctgagtagctgggactacaggcgtgtgccaccatgcccggctaattttcgtatttttagtagagatggggtttcaccatgttagccaggctggtctcaatctcctgacctcgtgatctgcccacctcggcctcccaaagtgctgggattacaggcgtgagccactgcacccggccagttatctaatttttaagtttacccccaatacataaagcatttatgagccaacaagaggcttcctaaagccataattcttgagcatggtaggtccttgtttttgctagggagacatatctcttatttgacatcagcaatggcagaaagatgagatgggtggccaactcatgggaggtcgacctcttcctggtatattatggaatattatggtatattatggaatccagcaaagccacacttgaacacaaaaactcactcaggagaaactcataatgaaaatgtctatcagaaacaaatacgaaatcctatttaggaagtacacatgtaagtcctgtgggaagattcaaaaagacctggtaactagctatgtgaccttaagaaagtgactcaacccactttgagcctcaattccctggcaataaaaccacagagaatagtttagccacaaccatattccctaccctcgaataaatctcactgtataacatgtttcttttctgtccttcagtaaaacatgatggtttcctccacaaatatcttctacgttggtgagatcctgcatactttttgatgatactacgaatggggatttactaaacggttatcattgatagacagaaatgctgtcagatttctaatacagacctcatatatagacagttccaatagtttattgactgaaaatcatattactctaagtaacatcagttttgtcttttcctatcatatactttaacacgacttttctttttaatggctaggacctccaaaataatgtgcaagagttgccaagaaggcaggcacccatatcttgttcccagcttttattatgaggttttgtttagtatttgagacagggtcttgctctgtcgcccaggctggagtacagtggcaagatctcacctcactgcaacctccacctctgaggctccagcaatcctccagcctcagcctcccaagtagctgggactacaggtgagcgccaccatgcacaactaattttgtgtgtgtgtgtgtgtgtgtgtgtgtgtgtgtgtgtgtgtgtgtgtgtgttttgttttgttttttttgtagagacagggtttcaccatgttacccaggctggtattaagaggttttactgttcccaaatgcctggtatttccacaatccttgatgaagagccttgtagatgcttgcttagtagacctttgtaaaccaatgtttctaagcctctctattctcatttctgcaaagtaagtagctaatacttataaatgtgattgcataattcttttttttttttttttgagatggtgttccgctcttgttgcccaggatagagtgcaatggcgtgatctcggctcactgcaacctctgcctcccaggttcaagcgattctcctgcctcagcctcctgagtaactgggataacaggcacccaccaccacgcccaggtaattttttgtatttttagtagagacaggatttcaccatgttggccaggatggtctcgaactcctgacctcaggtgatctgtccgtctctgcctcccaaagtgctgggattacaggtgttggccactgctcccagctgcataattctttagcccagttatttccctgtgtcagaccaacttttaagatagagctctacttggtttccagggaatatcactgctacaatatttttttcatgttacattttcagcatgccattgcacacaccatcttcattttatcctgacaaccacccagaaaggtactaagagcactccctaatgagaaaatcagaaatcaaaaatgctccaaaatccttaagtttttgagcactaacatgaagccacaagtgatctcttgtgatgagtcacatatattatttaaaatattgtataaaattaccttcaggctatgtgtataaggtatgtgatatggtttggctgtgtccccacccaaatctcatcttgaattgtaattcccataatccccatgtgtcatgggagggacccagtgggaggtaattgaatcatggaagtagttacctccatgatgttctggtgatagtaagttctcacaagatctgatggttttataaggagcttttcctcctctttgctctgcacttctcctcgaagcagccatgtgaaggacgtgtttgcttcccctccccaccttgattgtaagtttcctgaggcctccccagccatgctgaactgtgagtcaattaaactgctttcctttatacattacccagtctcgggtatgtcttcattagcagcatgagaacaaacaaactaatacagtatgtatgaaacataaatgaattttatgtttaggccaggcgtggtggcacgcctgtaatgtcagcactttgggaggccgaggtgggtggatcacctgagatcaggagttccagaccagcctaggcaacatggtgaaactccatctctacaaaaaatataaaaattagctgggcatggtggcacatgcctgctactcaggaggctgaggcaggagaatcgcttcaactcaggttgcagtgagccaagattacaccactgcactccagcctgagcgaaagagcgagacatcatctcaaaaaaatatatatctatgtgtttaggcttgggtcccatccccgagatatctcactatgtatatgcaaatattccaaattaaaaaataaaaaaaaacacttctggtcccaagatgaataaggaatactcaacccatactagtcttacttgatgtgtagaaaaacttggttacttggttaaagatatttatctgaccttggagcccagagcaaagactcaaacctgggtctcccagcacactctctcttccctatagccctcataagacaacgttgaatccaggagagtgtgtgttgacttagagaccccctcagagaacattatctgcaatgcaaactaagttcagattagtgcacaaagctagaggggaaaaaacatctgaaaaataagatgactactaaaaacctgacagaaggggacagcatccagggcacaggctctcaatcttggtactggtgacactgggggccagaaaagtatttgttgtgggagacgtcctgtgcattgcagggcaggtagaagcatacctggctagattccagtaatactctaacaccctcacacacgtaattaggacaaccaaaaacgtctccagactttgcccaacgtcccttggaggtcaaaactgtccctagctgagaaccactaatgtagagggtctgctctctgcctaggaaaatggttgcttcgaatttattgtaggggtatgggggtgctaaagaggagatgggtgaggagcagcaggaaggggaagagagggcggggaactcctgttgaaagataagctatacataccaagcaagcagaactatttcccttctttttcttttttttcagaactatttctaccccgagtgaggtcttctaggatgctactgtggtttttgaaagataacagtcagccgtattttcagtatctgacttcttttcagtaagttaataatacaataggaagagttgttaagaagctagaagaatcagctgggcacagtggctcacgcctgtaatcccagcactttgggaggccaaggcaggtggatcacctcaggtcaggagttcaagaccagcctggccaacatggcgaaaccccgtctctactaaaactataggtgggcgcctgtccagctactcaggaggttgaggcaggaagaagtgcttgaacccgggaggtggaggttgcggtgagccaagatcacaccactgcactccagcctgtgtaacagagcaagactctgtctcaaaaaaaaaaaagaagctggaagaatcaaatatgactgtacatctccctaaccagcaactcaaatcctctctgtctgatagtagccgaggtactgatcctccaaaattaagtttctcctggtgctcccctcccaaccccaccacctcctggctggggctggctgcccctaggaggatcccgaggactgcctggctgctctgtactcttttcagaagattttctcctttcctgaaacagcagcagttgctgagagctagatgcctggttaatctccttatcaatcagatattttccttatctgctgcttgtaagtgtttcctgttccataaaaataatctgataacaaatatggaacattttaaaaagggaaagcaaatcatttctgagatatgatttttctcccctacatgtataatgtgtgttaccagtttgataactagggaaacaggttgcaacctgtgttatcatggaatatttgcaggttattaagggatactgcagaagagaaaatgttcttatttccctgcttccataggctggctaacaagaaagtagaaaaggccctgtctatttgcttctggaataccttcaatgataccaggaaccggcaaacttttcctataaaggcttctataaggatagtaaatacttgaggctttgcaggccataaggcctctatcgcaaatactcaatttggccactgtagggcaaaagcacacacagacagtacataaatgaatgactgtagctgtgtgccaataaaactctataaacacaggcttcaggcagcatctagcccacaggctgtagttgcagacacctggtctacataaaccagagtatgggtgctctggctgtgtgtaaacacaaggtccatgtgtggacgatgaggaccatagactccagttcctacagaggccacacagggaccatacctgagtgaaaaaaaccatagcttcagctatcattctcctacatctggtaaaagcatgaatactgtgaagtatgtaagaaagaaccacctagccctggagtgtgaggatgcactggcattcaacctcgcagtgggggagacagcagggctgggcagagctcagacccatcttacagaggcagcccccactcagctccagtgatccaaggagttgggcagacacaaactcctagtgttgcctgaccttggggagaaactggcaatccctgcactcccctgaactatctcaactgttaatacactgtctcagcccaacaaaagacttctgtgggcctagtgcagtggttcacacctctaatcccaccaatttgggagaatgaggtgggagaacagcttgagcccaggagtccgcgaccagcctgggcagcaagaccctatctctacaaaaagttaaaaaaaaaaaattagccaggcatgttggggaacagctgtagacccagctacttgggaggctgaggtgggaggatcacttgagcccaggaggtcaaggctgtagtaagccacaatgacaccactgtactccagcctggacaacagagcaaagccctgcctcttttttttttttcttttttctgagacagagtctcgctctgtcacccaggctggagtgcagtggtgcgatattggttcactacaacctccgaggttgaagcgattctcatgtctcagcctcccgagcagctgggattacaggtgcgcaccaccatgcctggctaatttttctatttttagtagagatgaggtttcaccatgttgcccaggttggtctcgaactcctggcctcaggtgatctgcccaccttagcctcccaaagtgctaggattacaggcatgagccaccaggcctgggcctgcaaagccttgtttctttcaaaaaaaaaaaaaagcaagcaaaaaaagacttcaagtgtcccagtttttagggcaacatgtgggcccaagaaaataagtactagccactcattcatgatatgcagacaccctgtcctcagagaaggtgaagaggggccccatcatttctttgctatatttgatcaaagatgcacctaaggccattctgtacaaatctgctggcacgttatttctcaatcctttaatgcaagggaaaaaaaccaaaacacctcccaacaggatgtttgaactcaaatgtgtcagaactaaagagcagagtggtatttatctgtaaagaccctgacgtcatttggggcaaggcatttcttgccccatatactacaggacatccatttagcaacctgaccctcctccacaaaacgccgagagcatcttcccaggcattctcaaaccttcctaaggggtgaaaacactggaccaaaggtcttttaaaaatgcatggtaaaccttaggatgcttttaaaccctgaaaataaaatgtgttttaaagctctttaaacttttggctcggcgcagtggttcatgcctgtaatcccaacactttgggaggttgaagcaggagaatcacttcagcccaggagttcgagaccaaccagggcaagaaagaaagtgagacccccatctctataacaaaataaaaaaaactagccgggtgtgctgacatgtgccgatagtcccagctacttgggaggctgagggaagagaattgcttgagccggggaggtcgagcctgcagagccggggaggttgaggttgcagtaagctgtgatcatgtcactgcactccagcctgggcagcagagtgagaccctgtctcaaaaaataaaaatacaaataaaaataaacttccctaaaatgaattcctaatatatgataaatgggtggaatagggaccaaacttaaaactcatcccatattttcacatggtaataaaacatctctaccaaaaatggaaatatatggattatttgcctttttttttttttttgagacagagtctcactctgtcgctcaggctgcagtgtggtgacacgatctcagctcactgcaaccgctgcctcccgggttcaagagagtctcttgcctcaacctcccaagtagctgggattacagtcctgagcccagcctatttgctctttatgaggtgagaatagctttctttctggaacaatggaacaaagaagagaaactaaagtgaagaaaaagaagacgacagtggagaatcttcacatatgccaaagtcaaaagaacatggacatggaaagaaattcagaggtggatgaaatgagcagagcaggctgagtatgagacaacagggaatggtgggcagtgtggcaaacaagcaagcacaggcctgtgtctaaaggggcaggcttgactcagctccagctggttgctagattttgctgagtgctatggtctgaatgcttgtgtacctcccaaatttctatgttgatgttctaaccccaaggtgatggcattagagaagtggggccctgagaggtgatcagggccctgccctcatgaatgggattagtgcccttataaaaaaagggaccccggaacttggccaggcacggtggctcatgcctgtaataccagcactttgggaggccgaggtgggtggattacctgaggtgaggagtttgagaccagcctggccaacatggcgaaactccgtctctaccaaaactacaaaaaaaaaaaattagccgggtgtggtggtgcatgcctgtaatcccagctactcaggaggctgaagcaggagaatcgcttgaacccaggaggcagaggttgcagtgagctgagactacaccactgcactccagcctgggcaatgagagagaaactccgtctcaaaaaataaataaataaataaataaagggacaccggaaagcccaggtactcaggaggctgaggcagaaggataacttgagtgtccagcttgagcaatatagcaagaccccatctcttaaaaagagggtaggctgggcacagtggctcacgccagaggtcaggagttcaagaccagcctggccagcatggtgaaaccccatctgtactaaaaatacaaaacttagcagggcgtggtggcaggcgcctgtaattccagctacgtggaggctgagacacaagaatctcttgaacctgggaggcaaaggttgcagagagccaagattgcgccattgcactccaacctcagcaacaagagtgaaactccatctcaaataaataaggccaggcgcggtggctcacgcctgtaatcccatcactttgggaggctgagacaggtggatcacaaggtcaggagttcgagaccagcctggccaaaatggagaaatcccatctctactaaaaataaaaaaattaactgggcacagcggcgggcgcctgtaatcccagctactcgggaggctgaggcagaagaatcccttgaacctgagaggtggaggttgcaatgagccgagatcacaccaatgcaccccagcctgggtgacagagtcagactctgtctcaaaaaaaaaaaaaaaattgaaaaactcagttcctcagtcacttgccattttcaagtactgaagaaccacatgtgacctgtggctaccatcttggacgtgaggttttttttttttttttggagacagagtcttgctctgtcgcccaggctggagtgcaattatatgatctcagctcactgcaacctccgcctcccaggttcaagcaattctcgtgcctcagcctcccgagtagctgggattacaggcatgtgccaccacgcccggctaattttttgtatttttagtagggccagggtttttgccacattggccaggctggtctcgaactcctgacctcaggcgatccgtttgcctcggcctcccaaaacgctgggattacaggcatgagccaccgcgcctggccagacatgagcatttttacaggaattgtttatttcatataaagattgtatgattattctacttagcagagaaactgactttatgtttcatttttaatatcactatttatggcatttagctcaatgttcacaaccctgtgaaatttgtggtagtatcattatccccatttcagtagatgagaaaactaggcacaaaagaggttaacttgcccacagccacggagcaaaagcagggctggcatttcactatgtaattttgagagtgaaaatagattcatgctcagaaacacacacctctcacaggcctgggtatttaaccgttgctaggtctccttccatgaaagcaacaatctcgtttaattcaactttccatccccagggcccactcctctactcaataatgcacaaagtggatgaatgcatccctaggaatcactgctgaagaacaagtggcatcagaaccaacgggacactgtttccttcagtgctatgagatccgacctcatagtccagggggatagatacaatccaccagtaagtccactaaagtgcctctccatttttgtaatctgaagagtatctagcctgccccagagaattctaaagctagaatgtcccttagaaaagatccaaacggtgaacggatttttcctatctagctgactggtgctagctgccaagggagggtgggctctggaaagaatcctctgtgcttccacgaaaaggaactgtgaccaattacctaagcctgcccctggcaatgcctcttaccaaagaacctaaacccttcatttttttttttttctgagatagagtctcgctctgtcaccaggctggagtgcagtggcgcgatctcggctcactgcaacctccgcctcccgggttcaagcgattctcctgcctcggcctcccgagtagctgggactacaggcgcatgccaccatgctcagctaactttttttgtatttttagtaaaggcggggtttcaccaggttggccaggatggtctcaatctcttgacctcgtgatcgacctgcctcggcctcccaaagtgctggggttacaggcatgagtcaccaggcccagcctctaaacccttcattttacagatgagaaaactgaggccagaagggaacttgcctcaagccaagcaaccgcttccagacagagctgagaactagtcctgtgggcatggcccaggaggggaaaactcctcaggccacatggggaaaacagtcctaaaagcatgaaaaaaaaaaaaatacaaatacaaggaaacgccccaaaccctaaagaattatataccctcatctcatctgggtccctgctctgtccccgaaacagatctgaaaacccactggaaatttctacacaggcccatttttagccatctttttttgtccaaggcaaatgacagccagcgcaaggcagctaactaaatccaagaaagccggcgcttacaaggatccagaggttcagcgctactagctggcctctgtcccaccagtgaggacaccgttcccagcggctgctttacctgctccttattgttactgttcagtaagccaggtttctttttctttttaatggggcttgttgatgtgtcctgcggcgagtggccattggaagaatgtggagggctggggaactttcttttctgggctgttctctctgcagagccaggatctgaaagagatacaggaccacaggttttaaagcagtcagggaggcctgggccccacagggaggaggtgtggaggaaccaagtgtgggaacagagtgcattctgtcccccaactcccgaagccacttcagtgttcctcctcccagaatatacgtgcccccttcttcactgtctgcttcaacagtcagacaagtatttctttgacctatgtaacatttttgtaaaatcttaacttgttgccaagatacaaaaatcaggaaatttcatgtaataacctagatttttcacttttcttaaaaaaacagattaggagggccaggcacggtggctcatgcctgtaatcccagcactttgggaggccaaagtgggcagatcacaaggtcaagagttcaagaccagcctggccaataccgtctctactaagagtacaaaaattagcctggtgtggtggcacatgcctttaatcccagctactcgggaggctgaggcaggagaactgcttgaacccaggaggcggagatttcagtgagccgagattgtgtcactgcactccagcctgggggacagggcaagcctccgacgtgaaaaaaaaaaaaaaaaaaaaacagattaggacctgcaggcccctatagcaccagatacagctgagtaacagctaccccacttttagatggaaacatgtgcaatcgccactcttccccactacgtccctgctgatgagaccgaggccaacctgccaacagtcatcacacagggaccagtattgttcttaccccaaagaaatacgacttgtccatgcccatgcctgattgcaaaagcaggaaaccaaagaagatagaccaggaaggccatacttcaaggaaatgaaggcatacattctcctttgtggaaaacaacatcatttattcgtgtttaataggctatgaactgtaattgtgtggaaagaacacaccccacccaccgggaagttcccgtgctcccaccgcctctgggcctcgtgtttgagaccctcctccaaaaagatcaatacaaattacatccttgtggattctcaccagccccactcttgttcatgcaccccttcttttcatctttcagcatctcatttaaacacatgtacacttcagccaggcacggtggctcacacctataaaccccagcaccttgggaggccgaggcaggcggatcacctgaggtcacaagatcaagaccagcctggccaacatggtaaaaccatgttaacgagatcaagaccagctgggccaacatggtaaaaccagtcctctgtttgcagacgtctgtttcaagtgctttgggtacagcccacagtgctgcaatgcagtcatcttgcctttgctccttttccactgtatttgtagaatgtgtttctagaggagattgttgggtcaaaggccaagtggagaaaaagttttcacgaacaatggcgggaggtcatgagatcaagaccagcctggccaataaggtaaaaccccgtctctactaaaaatacaaaaacaattagctgggtgtggtggcacacacctgtaatcccagctacttgggagactgaggcaggagaatcgcttgaacccaggaggcagaggttgtagtgagccgagatcacaccactgcactcaagcctgggtgacaaaagtgagactctgtctcaaaaataataataaaaatacataaacacaggtacacttccactaccatccattcaatcttcacctccaaggacttgaatccactccatgcccaatggtggtcttcttaacttagggacgatgtaatgacacagcctggtgtacctgacatcctgaggaacgaaagctacaaataccacaagaggggtgagctgtgccaagaccataggggggatggggtgggatgggatgtgaaatctgcgaagatgtcaattaccaaagatgctcctgccccagttttaccactcagcatgtaggctgcatggtgcatctgtctccctgtctgtaggagggtcactgacagcagattaacagcatccaacgtggtccacgcaaggcctcctagtggttgactttcatgaaaaggcaaagtatcttccagcagattcacaaaggaagacaatgaacactttcccaaaacccaatctacaggatggaactctccagcctcaccatgcaagcttctggacaatcctgaacaaatattcagggggctgcgtggagacccagtcatgagtggaaattaaatgctaacaacaggtaccttgagggtgaacagacctgagagtccagagatcaaaccacagacatcaaaagggcggcccagagagcccaaagcgctggaccaaaggcacacagcagctagttagtgggaaaactcacgaaagagacaaagaggtcagcctagccaacatggtgaaaccccgtacttttgtactaaaaacacaaaaattagctaggcatggtagcgcacacccataatcccagctacttgggaggctggggcaggataatcacttgaaccctggagtcagaggttgctgtgagccgagatcacaccgctgcactccagtctgggcgacagagcgagactccgtctcaaaaaaaaaaaaaaaaaagagagagaggtgcagcccggggtgagcacattcccccagagaaacctcccctccctcccacatgggtcctcacccgactctcgccactgttcctgaaaactttttctccacttggcctttgacccaacaatctcctctagaaacacattctacaaacatagtggaaaaggagcaaaggcaagatgactgcactgcagcactgtgggctgtacccaaagcacttgaaacaaacgtctgcaaacagaggactgctctaagaatacattacagtcacatggccggacacagtgttcacacctgtaatcccagcactttgagaggccgagggggaaggattgcttgagcccaggagtttgagggtattgtgaactatgatcacgtcggagcctgggtgaaaaggagagacactgtctctgaaaaaaaaaaaaaaaaatttaattataaaaatttttaagttctttaaaaagatctaaaaacacctgggcaacatggtgaaaccccgcatctacaaaaaatataaaaattaggctggaggccgggcgcagtggctcacgcctgtaatcccagcactttgggaggccaaggcgggcggattacaaagtcaggagatcgagaccatcctggctaacatggtgaaaccccgtctctaccaaaaatacaaaaaattagccgggcgtggtggcgggcgcctgtagtcccagctactcgggaggctgaggcaggagaatggcgtgaacctgggaggcggagcttgcagtgagccaagatcgcaccactgcactccaacctgggcaacagaggggtgagactccatctcaaaaaaataataataataataattaggctggggacggtggctcacacctgtaatctcagcactttgggaggccgaggcaagcgaatcatctgaggtcaggagttcgagaccagactggccaacatggtgaaacctcatctctactaaaaatacaaaaaactagctgggtgtggtggcacgtgcctatagtcccagctacttgggaggctgaggcaggagaatcgattgagcccaggaggcaggggttgcagtgagctgagatcgcacgactgcactccagcctgggcaacagagcaagactccgtctcaaaaaaattaataataaataaagtgtatctagcaccattaatggaccaatattcctcccaaaaaaagatttaatatacacatcaatgtttgcataaacctagaatattcctggatgaacacaaaagtacaacaaagctcgacttggggactactggttgccttgggaggggtgcctgcagggagtccagggaaggggagtccagggaaggattattttccactctatacccttgtgtacttatttatcatgtgactggatgacgttacgaaaataaagaaaattggccaggtgcggtggctcacgcctgtaatcccagcaccttgggaggctgaggttagcagatcgcttgaggtcaggagttcgagaccagactggccaagatggtaaaatcctgtctctactaaaaatacaaaaatcagccaggtgtggtggtacgctccagtagtcccaactactagggaggctgaagcgggagaatcacttggcgccaggaggcagaggttgcagtgagccaagattgcaccactgcactccagcctgggcgaaagagagagactccatctttaaaaacaaaacaaaacaaaaagaatgcaaattatcaggccccaccccagatctacagaatcagaaactctggggtagggcccagcaatctgttttaataagtcctcccgaagactgggaggtacactagtttgaggaacgctagggtatgtgtatgtgtttaggagatggggtctgagttctcaactctacacaatcctgttccacactggcgagccagagccaatggcctctacttccagacattatttgaggggttggttcaggactcaggatagaagctaagcaagggagtcaggctggagaatgaggctaaacaggaaacaaccccaggcaagtctccacctctcagggcctcagggcctcacctgcaaaatgggaagagccgggagaaagggactagactagaagttcttgtttaaagaccagacagtgctccagggacccttgaacaggccatcactgtatacaggagtgcaatttctagggacatggagtcatagcttccttcacctttgcaaaggtgtcctcagctccaatgattaaaaacttcagggcccccagaggatgttaaaagtccctcttcaacattacttaatttaatgagaaagtgggaaaaaaaatcactagacagtaatatacttgtaagcgatttagagttggcaagggactatcacccaagcccaccaggaaacaaagggggaaactgaggttctgctcagcaagaggtagggggaggtgggtcctagcccaagcatgcccacacctgagagtattccaaaccttctagtttcagcaaaacataaaaaccccaattctgtttgctgttacaaacaccaattccccctggagttgatgagagttcagtgactgtatccaaggggtcgaaatttgataggttccaaacaacagacacatcagtcaacagcaggagatttcaatgaagggttgtagggagaagaattaggaaatgcctgctggattcggtatccttcggagggatgagacagcaggggggcattattacttaaatgccccccactccagtgggggctgggcctctggtgatgatggactggtgggtgtacacctgactgtagccgtggtacccaggctccataaggaccctttccagaaagctgagtcaattttttcttctttaatgatttaattctgacaaggatgtattgcccagtgcatttcatctataaactttgaacaatgacaaacagccactgtcgactgaaccactggttcaccctggatctgaaagacttttctgctgccttttctgagggagtaggacctgtgaccccgcccggctggctcactcacaaccctctgcctctcacccatcccccaaaaatgagtggttctgaatgagttaacgtgggtgagggaggaatgcagccttatggagaggacagagcagtgactcaggaaaacagcttggcatggagcggaaagcagcagaattttcctctccttgtgacattttgctgaaattgtaacaatatgggaaggtctactgggtattaagaaccaggcatgaggccgggcacggtggctcacgcctgtaatcccagcactttgggaggccaaggtgggcagatcacaaggtcaggagttcgagaccagcctgaccaacatggtgaaaccccgtctctactaaaaatacaaaaattagctgaatgtgatggtgagcacctataatcccagctactcaggaggctgaggcaggaaaattgcttgaacccaggaggcggaggttgcagtaagccgagatcatgccattgtactccagcctgggcaacagaacgagactttgtctcaaaaaaaaaaaaaaaaggaaccaagcatatgaggagatccttcccaagcctgtgatccaccagaaatcatcctggagctcagcacttcctggatgtcttttgatttaaggggcatcttaattcaagataacacaggctcatagctttcctgagccaagagtatgaagagctaagagtttcggccaggtgtggtggctcacacccataatcccagcactttgggaggccgaggcaggcagattgcctgaggtcaggagttcaaaaccagtctggccaacatggtgaaaccccatctctactaaaaatacaaaaaaattagccaggagtggtggtgtgcgcctgtaatcccagctacttgggaggctgaggcaggaaaattgcttgaaccagggaggtggaggttgtggtgagccaagatcgcaccactgcactccagcctgggtgacagagcaagactcgctctcaaaaaaaaaaaaaaagaaagaaagctaagagtttcttttattatatgtgatattctaggcaatgttcaaaatgcatttcctgtagtccccactaagtcacctgcctgagatcacaaagctaccaaggagcagtgctgggatttgaacccaggcagtgaggctccgagggccagagcagtactgggatttcaacccaggcagtgggactccgagggccagcttctaatctctgtaccacatggccttgtaccaggagggcctcatcctcagccctgtagcaagaggactccctaatttagggtctatgatttaagagcacactctcattttgccttttttcccctaaactgcagatggaagtatagggacagagaaggtccaacaaacagtttcaggaactgggaaaaggtggaaagtcgtgtcattcactgatgacaccgttctctcaaaggcagtccccagaaagcacattcacctcccaatttccaaacagtggcatcagtccctgaaataggctgggggctccagggccaactcacctccccttttccagcctccatcaaggctaggcctccccagcaggccacatcaggtacccgccctccaccccactcctgcccccacatccggtgcctgagtcacagcacatgccgttctccaggggctaggaaatgacacaccattacagggaattgtctcctccctcaagggaaagggccgcagctgaaaggccgggagcttcttgtgtttttgtgggtgtttaatttccttaatgatgtcgacagcaagcctgctggggcctgaacgaaaagagaagcttggtccacaggctgagacaggcatgacaggccacaggagtagggcaaccaaccatgtgcttagctgggtcccgggcaaaccaggacacataggtcaaggcatatgctctcatgggccaggttgcaaacgacagagaggcaggatgccacagtggtggggaatcagctttctggcgtcaaaatgcatgcagaacctggctgtgctctcccctgcagtgtgaccgtaaaaaggcaacttaacctctctgtgcctcagagagtttaccactttacaagtggtaccttgtaaagttatcgaagaagtcaatgagttaattcacgtaaagctcttagtataatacctggcaaatagtaagcacctattcaatggtaactaatgggtaactgtattttttttaaccaatcactcttcctccttttcttgcttctcttccacctcctccccgactaccgccccccactccaaaaacacagcttgctttctggaaggagcatgttaaatcaattccacaagttcaaagctatggaaaacaccggcctgtgtagactggagaccagaatcagcccaggacaggatttctgcatttcaatcagactgaaaatgccaggtttcccccagtaactgtgaaggcagggtcagaagcagaggcctgctctacagcccttttcgtaatcaccagtcctccccttggcctacttcaaacatgaccacacactgctgctcccccagaagcagcaaagcagagcatggttaatcacttcaaagcgtttcccaaagacacagagcaggtacccaaacaggcctcccttccccaggaatatttggggccctccccaaccagtaattacatcataaagagacaaaagtccggaatttcctcctggcagagcatagaagtaagaaatcaggagcaaaggttgggggtggggaggaagcaaaattgtcctcgcagcagagaatgcctaagccaggaggaacttgtaaatgaaaaccgctcgcattagcaaatgattatttcctccaacgctgaccgtctcttagacccacagaaactcgaggaccggtctgcaccctggctgacttgggcctgccagagctgccgggctgagccctctcctccagaggactgcactggcctgaactgtgcttataaagaatctctgcaaatcaacaggaacttctcatccagagccgggatagggagggctggaatggaaatgaggctgtggaatgaaaggtcactctcaacttggggaaaatggcatttcaccaggaacatcaagtacctcggaggcagaacatgcgaggggcagggaacgccaagaggaggcacttacctgccattgagaaagtgcggctgctcagagggcctagcctctcttgttcaaaagagaacagaggctcacccacagcagacattcctgcttccggatcctcagcggcctctcccagggggaggaggaagaagcaaagagaacaggctaagagtcaccacttaccaggccagccccggtcttgtacgcattaggtcgcccggcggggcaaggacactgtcacctctttgcaatcaggcagtctgaaacccagcgacttgccttcatgtccccgggctttcgcctataatttatcaccctcaacagcagctcggctgagctgaaagtctccggtgcagtgcaccgaagagccattgatttcgtgggattgtgaataaatacgaggaactgcagttgttctgctggccgaggtgacaatatcagaagggagcctggggggagggaaacagctgtggtttgcattttgaagttgtttttaacatttttagtaattgtttcagattctccagttctgatgcccctctcctagaaatgagaaaacccatcttttatacttgaggtataatcctttcccactagacacagcctcctccacccttctctcaataatgcagaagtggtgattaaagggcacattcatatgtaaaaggcgaacttccaaactcgcctggcaggacagaaattgcttcaatctacagaaaagaggctgatttacaattgaattcagtgtttagccctcaacaactagaggcaatagcaaccgcggccctttctcctccccagctgggatgaggccctctggaaaaacgacaacatcgcaacaggaatttcctggatcaagaatgccaagttctttccaattttactgaggcaggatccgactccctgtgagaacgcactgcccaccacccacccaccccctcagcaggcccaggccccaaaggctccctccaacatgtgtacatgaggcccttcaaactcgaccggaacaccacaaagaatgtggagaaaccggttgcctctggcctttacattgtggctggctgaggagctggttctggtggctgacacccgttggcactatttatccagcccctgcctggcttgggttctggaaatctccggtggtagtggcttccaaactgcaatggggaatcgcggcgtcagagggcaattcagaaacaaaaagacagttctgtgctggcagcatttgaagcacagaagtgggttgggagaagcaaagggaaattagcttcagaaagggggcagatgaaggaagaggcgccactgctaaccaaccaaggtccccatctgccctggatggtatctctaaaagccacctaaagaaggcaaaattctctactgaaacgccaggtacgaagggacaggccctccacagtcaccttgtcacattcctttggggagcgaagagttcagacccaacatgtcacccaaattaccctggccagccaccacgtaaagatgctgcggctgtgcatggtggctcacgcctgtaatcccaacacgttgggaggccaaggcgggcggatcacctgaggtcaggagttcgagaccagcctggccaacatggcgaaatcctgtctctattaaaaatacaaaaattagccgggtgtggtggcacacacctgtggtaccagctactcctactggggaagctgaggcaggagaatcgcttgaccccaggaggctggagtgcagtgagtcgagatcacgccattgcactccagccggggtgacagagcaagatgccatctcaaaaataaataaataaagatgcttaacatcactcagatagtagtggggtgattctaagaacatgtcctattgtctacagggctcatgggtgcacagaaggatagacggggtagccactgcaacagggctttgtagaaaagtcagacaggaaccaacattgatgcccatatgtgaaacatcatgatgcagccataaaatggaataaagatggaatcccgtctgcatagacgggcatggtccaaaatccaagtgaaaggagaccagaaatagaaccagggtaaaagtttgttctctgaggcttctgggtttgcagagacatggaggaacacccaggaaacccagtaaacgctggactcctctgaattatttctgatcatgtttacatatttaacgaaggtatttattaatggctttggggaaactgggtgataatgacaatatttatggaacactcactgcatcctgggcactgcccagccagggatcacgtctgtatcccttgtacccggcatacagcaggagctcagtacacgcccccatcatcaaacaaacacttttacggggctcaggtgtttagaagagtggaaagcagtatcagcacacccaggggacatctggcaatgtctggggacatttttggttgtcacaactgggcaggaaaaggagttgcgacaggcatctactgggtagaggtgagggatgttgctaaacattctacaatgcacaggacagccctaagacaaagaatgatcaggcccaaagtccacagtgccaaggctgagaaatcctggtagaaagaaacttcagtgagctaccaggcaggtctcaccatgtgtaaacacaccacccacagaggtgcatgtattcattaagaaggaaaatgattcctgatgtttcacctggtggccctgacttcagacttcaaagaaaataatgggaccagtcagtcaacaaatagtcactaggcaacaactagatatctgggctatcaggaaaactgtcccaggaaggcctctgccctgatggaaggacagctagaaacacagttgtaacagctaccttttattgagcagttactatctgggaggcattgttagaaatacaaatatcgatttatttaaaactcgccgcccttttttttttttttttttttttgaaacagagtctcactctgtcacctaggctggagtgcagtggcacaatctgggctcattgcaacctcagcctcccaggctcaggagatcctcctgtctcagcctcccaagtagctaggactacaggcacaggccaccatgcctggctaatttttgtattttttgtagagaaggggtctcgccatgttgcccagactggtctcaaactccagggctcaagcaatccctctgcctcagccgcccaaagtgctgggattacagatgtgacccacctcacccagcctccctgtttcattgataaggtaatgaaagcccagagaaaaccaggcccatggtaaagcggctattaagtacagaatgattgagaaactgattacagatggacaaaccactgaacaggaaaaatatcaggagtttgtgaacacacctagcaggtgtgaggatagacagggaaatattcctctatttcctttgcagaagggtttcatgtggttcacagctattgtttactgagaagctacaaactgtcccaagaatcccaagaggttgggatggcatttcttttttttttttttttttttcagcacagaatctcactctgtctccaggctggagtgcagtggcgcgatcttggctcactgcgacctccgcctcctgggttcaagtgattcccctgcctcagtctcccaagtagctgggactacaggcacgtaccaccacacccattttcactatgttggccaggatggtctcgatctcctgacctcgtgatccacctgcctcggcctcccaaagtgctgggattacaggcgtgagccaccacacccagccaggatggtatttctgtacccattttataggtgaggctcagagaggcaaagtcatttatatgcttcaagacaagcagatcgacacagcacgccccacctccatcacggttgagttccactctaaagcccttcactgtacaggtcaactgtctctcctaggcttgtgagtgccacctggtaattctccatcacaaagggcatgcttggcattggccaacgtcaacacagcattgtcgttcagtgtgtgggctctggagccagactactaggtctgaatccaggtgctggcacctgccagctgtgtgaccttgggcaagtttcttagcctctctgtgactcagtcattcagttggaactattaggctcttcccaaaagggttgtgaggattaaataagataatgcatacaaagtgaatgaaaggcatctggcacatcaaagcaccatactttattaccattattctcctggggggaagagggggccagggcacagaaaaaggcaataaccgagaaatttcaaactcatttcccccaacttttctcttttttgggggagacagggactcactctgtcagccaggctgcaggacagtggcacagtcatggctcactgcagcctcaacctcccaggttcaagcgatcctcccacctcaggctcccaagtagctaacaccacggtgtgcaataccatgaccacttaattttttatttttcgtagcgatgggatctcctagtctcaaacttctggggtcaagtgatcctcccacctcagcctctcaaagtactaggactacaggcatgagctgttgcacctggcccccaaatctttctgtaccttcaccagactacctcttccaagcctgtttttaaaaagggttcactgatgagaaacacaaatattcacaataaaccccctcaggctgtcaggagctcaaggaagccaggctcaaaatccctccagggctcagaacttccttgaaaatcaaagcagaattctccagatggcccacaatcccagccccaccccacctccactgaccttcccccaggactcctccaactgcactcccctctccactcaaatgaggctcatcaagctagggagagagctggtcctggctcacatggctgtgtgtcccaacaggttacttcacctctctgagcctcagagtcctagtcatctgccaagtgttattaagaatgccaaacctggccgggcgtggtggctcacgcctgtaatcccagcactttgggaggccgaggctgatggatcacaaagtcaagagatcgagaccatcctggccaacatggtgaaaacctgtctccactacaaatacaaaaattagctgggtgtggtggtggaggacgcctgtaatcccagctgctcggggggctaaggcaggagaatcacttgaacccgggaggcggaggttgccataagccgagatcatgccattgcactccaacctgggcgccagagcgagactctgtctcaaaaaaaaaaaaaaaaaaagaatgccaaacctttaccggtcgtggtgtctcacgtctgtaatcccagcactttgggaggccaaggcaggtggatcacctgaagtcaggagttcgagaccagccaggccaacatggtaaaaccccatctctactaaaaaatacaaaaaattagccaggcatggtggcgggtgcctgtaatcccacctactcgggaggctgaggcaggagaatcgcttgaacctgggaggcggaggctgtagtgagccgagatcgagccactgcactccagcctgggcaacaagaagctctgtctcaaaaaataaaaaagtaaataaaaacctcaataagatagtgcactccctgcttaaaaccctcaaagagcttactgtagacacctaaggtcttatgaagacctgcagtgcccctggtgacctgatcctgcccaccttctctccttcattcactcagctccaaccccaatggcctcctttcagctccttagacaagctccttcgcatgcggctggccccttcatctataatgttctgtgcccagtcctctccatagctgccacttcatcttttggctcactgccctagagaggccttctctgaccaccccagcctccagcctccagactccttattatataatcctgaagttatttttttcccttcattacagtcatatataggtgaaaattattttttattttttattttttgaggagtctcgctctgttgcccaagctggagtacaatggtgtgaccttggctcactgcaacttccacctcctgggttcaagccattctcctgcctcagcctctcgagtagctgggactacaggcgtgcgccaccacgcccagctaatttttgtatttttggtagagacggggtttcaccatgtttgccaggctgctctcaaactcctgacctcaggtgattcacccacctcggcctcccaaagtactgcaattacaagcgtgagccaccacacctggcccatagttgaaaattatcaaaaattattttcctcttctgctggttcactggtttattgtgtctctccctccagagtgtgagctcaatctcagcttgtccatccttctttgctgtagcccagtgccaggtacatggcctggctcggaagtaccccaaagtacatatcagaccgactaactgagcgactgtacagggttaacaaagccctgtacaggtgggccagccaacctgactcagcaaactccagtttttcttccccagtctaagaatttcttccagcaaatcaggaaggcagcagggtagcgaagtcaacagggaagattacacaaatgggagcctggtcacgtcggcctctgaaagggaccccagaacaggacattctcctttcaacaggtactcagccattctcttgcctaaagaacccatttcccccaaaagcaggggagtaagtaaagatttataacttgaatgggatggggccattcagctaaatgcaattactgaaaaatcaaagggggatatctcaggaggtttttctaagacaaccaatttactcattctctcaattattctttttccattttgttttgttttttttttctgagacagagtttcgttcttgttgcccaggctggagtgcaatggcacaatctccacctcctgattcaagcaattctcctgcctcagcctcctgagtaactgggattacaggcacatgccaccacacccagctaattttattttattttatttatttatctatttatttttttgagatggagtattgcatgtggctcaggctggagtgcaatggtgcagtctcagctcactgaaacctctgcctcccaagttcaagcaattctcctgcctcagcctcttgagtagctgggattacaggtgcccgctaccacgcccggctaattctttgtatttcttagtagagacagggtttcaccatgttggccaggctggtcttgaactcctgacctcgtgatccgcctgcctcggcctcccaaagtgatgggattacaggcatgagccaccacatccagcccaccagctagtttttgtattttttagtagagatggggtttcaccacgttgcccaggctggtctcgaactcctgacctcaggtgatccacccgcctcggcctcccaaagagctgggattccaggcgtgagccaccatgcccggcctcccagttattcttgaggagagctattgtttcagaattatttagcagttcaaaaaataaaaataaaagaggcatgactttctccagggaaaacatattcccttctaggagacccgccactgagatggccatttaaccaaatcttcagtcttggttctgggccctttttcttatacgtctgagtctgaggatctctttttccaaaacctccgtagatcctcagtctccctctgggttctccaagtctgcccctgctatgagaagcagggatcagatacaggtactgatctatgtgcagacaggctcagcttcgactgggaaaagcaaaaaattatttttcaagttcatcttccctgcatcccatggaaatgagtcaagagatattcagtctgctccttcctgtctccatctagttccctcgagcttctcagagtgtcagcatcacaccaggcataagacgggtctagattttcaagataaatatttgtcttacaacacagtccctcggctcttatcaactgctactgtatctggtcccaagtcaagaaatagcaacctggtttgaagtgactgtacccaaacttgaagtctggggatggggagttacgggagggtcattaaggaggtggtgcgcaaaaccaggtcagccttattaggaagagagcactacttacagctgatgcggtgaaccagtgatctggaaaaggagcaatcagtggccaggaaaccagtcagcctccctagtagctggaattacaggcatgcaccaccacgcctggctaattttgtatttttagtagagatggggtttcaccatgttggccaggctggtctccaactcccgaccgcccacctcagcctcccaaagtgctgggattacagacgtgagccaccgcctttaaagagaagctctagcttctcttttaaaataaggtcattcacagatgaaacaaggggttaaagaaaaaataggccaggtgcggtggctcacacctgtaatcccagcactttgggaggccaaggcaggcagatcgtttgaagtcaggggtttcagagcagcctggccaacatgatgaaaccctgcctctactaaaaatacaaaaatattagccaggcgtggtggcacacacctgtagttccagctacttgggaggctgaggcaggagaattgcttgaacccaggaggcaaagattgcactgagcagagtttgtgccactgcacttcagcctgcgcggcagagtaagactcaaaaaggaaagaaaagaaaatcacaagatccctccacatagggccccctattcccacatggaacaatcctcccgcctgcccactttgggtagaactccagaatccctgtttgccgaggtctccattattcttaactttcagataattaaatctataacttattgtttttttgtttgtttttccagaaacaggtcttgctccgtcgcccagcctggagtgcagtggtgcaatcacagctcactgcagccttgacctcctgggctcaagtgatcctccggcctcagcctcccacgtagctgaggctacaggtgcatgccaccaagctcagcaatttttttttatttcagagatgaggtctcactatgttgcccaggctggtcttgaactcccgggctccagtaagtctcctgccttggcctcccaaaatgctgggactacaggcatgagctaccatgactaccctagatcattaaatctaaacttgaaaggcccttaaagggtgtaacaggacaggggaagcagagaaggataataaggtaaagagagggatcagagacaagggatgttttgctaggatggccaggtcctagaaagttcaaccccattataggtattgcataagttttttgacatttttataagcatggagagggtggtatagacaaaaacataccaaactgttatcactggttacctggcaggagaagatttttagctttttctttgtatactttggcttgttgtcaaggagatacactgatttttatcatttgaaaggaaaatccaataaaccttaacccctctgccaccccacaaaaagttaattcttttttttttcgagacagagtctgttgtccaagctggagtgcagtggcatgatctcagctcactacaacctctgcctcccaggttcaagcgattctcctgcctcagcctcccgagtagctgggattacaggcgcgtgccaccacacccagctaatttttgtatttttagtagagacagggtttcaccatcttggccaggctggtcttgaactcctgacctcaggtaatgcactggcctcccaaagtgctgggattccaggcatgagccaccgtgcctggccaagttagtttccagttcttggaagagatccttcattcacaaaacatttaatgggcaactaccatgaaatgccagtcccttgttagtctaaagaggtgagagttatttggtctatcagtctagaagagacacacaggtaaatgcataattacggtaaagcatgttgaaggctggagggaggaccgcccagctccctggcatatcctgtggaactttaccccagtcaggcctaggtgccaaggggcctggcaaaaagggaattcagcagggcctgaacaaaacacaccaacttgcaaagatagaaagaggactgtgttctctgcacaacttttcaaagaataggcaagctcaggaggcaatgaccaagcaaaacttaaaactcaataatcatgcatggaacatgttcagtgctgtgtcccctggcgacatagcttcacctacagcattcagcacagcatgcacaacaaatccattaatctactaaggctacggaacagtgtgatccaatcaagcttgctcgaatgatggcaatgttctcgatctgttctctatcagtgctgtctaataacagcagcctctaatcacctgtggctgtcagacacttgacacgtggccagggcagctgaggaatgaattttattttgtaaatctaatttttttttttggagatggagttttgctcttattgcccaggctggagtgcaatggcgtgatctcagctcaccgcaacctcctcctcccgagttcaagcgattctccagcctcatcctcctgagtagctgggattacaggcatgcaccaccatgcctggctaattctgtatttttagtagaggcggggtttctccatgttggtcaggctggtctcaaactcccaacctcaggtgatccacccaccttgccctcccaaagtgctgggattacaggcgtgagccaccacgcctggcttgttaatgtaaatttaaagagccacgtacagctagtggcgactgtgttggacagcacagctgcagaagcttaatattaagacaaagaagcatgcctggcaagcaagcaggacactgcacaatcatccacccatcccaatttgcctctagggactgagtagttgaattcaaggcaccggatgcagggaaatgtgaatatggattcacctttcactcctttagtctagcctggcaattgttaactctttagtatgcatacgaatttctgatcaaagctgaatactttcgtgggcaatttaaggtactttgaagagtgatttttgactttggaacctaaaagaacttctctgtgggagactgtaaataaagggttcaggccaagagagggcttgggtctccatggacacagtgaggatggtcctcacgaaggtcagtctggaaggcaatgccaagtgtgtctcagcaaggtgcacatcacaggactctcacaaggccgtgcagtctgtccaggaaagacagatgctgcaggacccctgcagtgcagtggcaagatcatagctcactgcaggctccaccttctgggctcaagatatcctcccacctcagcctcccaagtagctgggtctgcagagacaagccaccatgcctgggttttttgcttttttttttttttttttttgtaggaacgggtgggtcttgccactttgcccaggctggtcttgaactcctgggcttaagctatcctcctgcctcagcctcccaaaatgctgggattacaggcgtgagacaccatgcccttaaggctgtgttcttaaggagccactgcaaatttaaaggagagtgggacaatctgacttgtgttttagaaggcgcccattagaagttatactaatatgtcagaaagcaaagaaaccagggggaaagggccatttcaaagagtactatgtccctagagggaaaaggaagacaggccaccagtcgctttgcagagaacagacacttgagctgggtaataatctccaggcactggattaatgctgaaaacaaagccatcctctctcgccgaaaggctgcttttacttcagtctctaggatagaagttctacccatctgatagagctaaatcatttgttcattcaaaaaaatatttattatacgctcaccagcagcaggcaaggtggtagtaaaacaggatgagcaaaaacaaaaggcagaactcatcctcattttgagccttaaaattgatggggagtaaggagaggaaggcaaggaggggaccttcaaggtatgggcaaaggccctgaggctttgatggatctgcacagtcagtgtggctggagaagagagaagtggaacacggagagaagtggaacacagagagaacggaacacggagagaatggaacacagagagaacagagactagcaagatgggcagaggccagcacaggagggttttgcaattatgaatctaaaagccaaggaggaaacacttaagagtttaaagtaggaagggatagccaggaagatgttcctttcaaaagactgggagggtgcggcagatagagatagtgagaacaactacgaggccactgtagttcaatggtgataggctggttgaagtggagtgacatttaggatacgatattgtaagaaaatgacacaaaagggcaaagaacagaagaatggggaatgagtccatatctctgggggtgaagatgtaaaatctctcatggacatcttgagtttgagacgcccatgaacaggcagggaggtcaggtaggcagctgaccctctgcaccatgactcagaagcaatctaggttggaaacataaatgtctgagtcataaagctccagatgtgggtaagatcacccagagaaggaacgtgctaggcgagacaaggacagggccaagctttcagcaactccagcatttaatggccagagagaggaggagaaggtgccagggaaacagaaggaaaatcagcactgcggtggcaaagaaggcaaaggaagagagagtgtccacaagaataatcagcatctccagtactgcagagacagcgcagcagatgaggatggaaaacctcccctggaaaaggcaacacagagtctccaggaagctcagtggggatgtgaatgtggaaggtcagggtggaagccacattggagcttgcaggacaaagacaggaatacagacgcttctaagaagtttggcttgctggacgcggtggctcacgcctgtaatcccagcactttggaaggctgaggcaggcagatcatgaggtcaggagttcaagaccagcctgaccaacatggtgaaaccccgtctctactaaaaatacaaaaagtgtaaaaaatacactttggaaggctgaggcaggcggatcacgaggtcaggagttcaagaccagcctgaccaacatggtgaaaccccgtctctactaaaaatacaaaaattagccgagcatggtgacgtgcgcctataatcccagctactcaggaggctgagacatgagaatcatttgaacccgggaggcagaggttgtagtgagccaaaattgtgccactgcactccagcctgggcaatatagtgagactcaatctcaaaaaaaaaataagtttggctttgaagaagaggacagaaatacagcagttgctagtaggaaagatgtgggggtcaagacagcagagaggggagacaagtgcctttaaaagtctgtgactccaagcatggtggatcacacctataatcccagtacgttggcaggccaaggcaggaggatcacttgagcccatgagttggagaccagcctgggcaacatagcaagactctgtcgctacaaaaaattaaagaattagtcaggcatggtggcatgtacaggtagtcccagctactcaagaggctgagatgggaggattgcttgagcccagaagttcatggctgcagtgagcgaggatcatgccactgcactcccgtctggggaacagagcaagcccctatctcaaaaaaataaataaagacaacacaaaaaatttaaatgtgtatattcttcaaaaggttaatagttaccctatgaccccacaatttcactcctaaatctatacccaagagaaatgatgtgtcgtgtctgcacaaaaactcagacatgaacactcaccgcagcattatccctactagccagaaagtggacacaactcaaacgtccatcaacacatacatagataaacaaagtgtagcatatccatccaatgcagcattattcagtcataaaaggaaatgaactacagaccctcctcaactcacgatggagttacagatgataaacccataaaatgtaagtaccagaagtcaaaaatgaggtcacacacagtggctcatgcctgtaatcccaacacttcaggagactaaggccagaggatcacttgagcccaagagttccagaccagcctaggcaacacagtgagacccctgggtctacaaaacatatatatatgagagagagagagataaaaaaacacaaatgcatttaagccagacatagtggtacactcctgtagtcccagctacaccagaggatcccttgaggacaccattgcactccagcctgggcaacatcgtgagaccccatcagaaagtaaggcaggcagcactttgagagactgagggaggcagatcacttgaggtcaggagttcaagaccagcctggccaacaggtgaaaccccgtctctactaaaaatacatggcagggcacagtggctctcatctgtaatcccaacactttgggaggccgaggcaggtggatcacatcaagagattgagaccatcctggccaacatggtgaaacctcgtctctactaaacatacaaaaattagctgggcgtggtggcacatgcctgtagtcccagctcctcgggagactaaggcaggagaatcgcttgaacctgggaggcaaaggttgcagtgacacgagatagtgccactgcactctagcctggtgacagagcgagactccgtctcaaaaaaaaaaaaaaaaaaaaaaaaaaaaaaaacattagctgggcgtgatggtgctcacctctagtcccagctactcaggaggctgaggcaggagaatcgcttgaaccaggaagcagaggggtgcagtgagctgagatagtgccactgcactccagcctgggtgacaaagtgagactccatctcaaaaaaaaaagaaaaaaaaggaaattaagaaagggaaggagggaggaatgaataaatgaataaataaataaataagcatcgaatatacataacctagggaacatcatagcttagcctagcctaccttaaatgtgctcagaacacttagagttaggcaaaatcatctaatgcgaagcctattgtataatagtgttgactctctcatgtaatttatggaataccataatgaaagtgaaaacagaatggtcgtatagattgtttgtttaccctcgtgatcatgtggctgactgggaggtgcctggcaccccaagagagtctcatactgatgctagccagagaaaagatcaaaaatccaaaatgccaagtactgtttgtactgaactgtcacttccgcaccactataagtcaggaactgtctgtactgatgatctatgctacaagaatgtggatgagccttgaaaacattattctaagtgaacgaactcagaccaaaaggtcacatactgtatgattccatttatatgaaatgtctagcataagcaaatccacaggcacagaaagtagactggtacttgccaggcacaggggtaacgggggaatgggaagtgactgctaatgagtatgaagtttcttattgggggtgatgaaaatctacaactgattgtgctgttggctgcacaactctgtgaaaaaaaaaaatatatatatatatatatatattttaggcagtcttgctctgtcacccgggctggagtacagtggcacgatcttggctcactgcaacctccacgtcccacgttcaagcaattctcccgcctcagcctgctgagtagctgggattacaggcacacgccaccacactcagctaattttttgtatttttagtggagacagggtttcaccatgttggccaggctggtcggaactcctgacctcaggtgatccacccgcctcggcctcccaaagtgctgggattacaggcgtcagccaccacacccggtctccgtgaaaatatattaaaaaccatcaaactattcactttaaatggagaactgggcccaggagtggtggctcacaccagcaatcccagcactttgggaggccaagacaggaggatcgcttgagcccaggagttcaagaccagcctgggcaacatagtgaaacctcatctctacaaaaaaatataaacattagccaggggtggtagtgcacacctgtagtcccagctactcgggaggctgcagtgggaggactgcttgagccaggaaatcaaagctgcagtgagccgagatcgtcccactgcactccagcttgggcgacagagagagaccctgtctcaaacaaacaaacaaaaaaaaaggagaattgtatggtatgtgaattatatgtcaataaaggtattttttttttaagtctataaagcgctggatctctaggttcccaggaaagcccaggataggtgaggggagtcacaggaagttgaagggggcttattatcattccactcaccctcacccccccacagccatgacacctggtctttccaaactgatcacctcaagtcatcggtaaaggatccactatcaatagagaacaatgaaggaatgacgactttaataaggcaataaaaagtacccagatctctaaaaggcctcagccctgatatgcttattctacaggcatttagagaggaaaaagaagagatggttctttttaaactaagcttgaaacggtcgattttagatcacagtcttctagaataataatagtcacacaaacatataacgtgggtcatgcttcaaaaatggggcaaacacaaggtttgcatgagtgaaccacaaagctaaattgcacagacactgccgacaggattccatgaacagatgcacagtagagacgatgctggccaagagaaggtagaagatttctcatttgcaaaaccataatcagacatcttcagagttctgggatattttagaccttgttaggagaggaacaatctggtagtcatctaactcacaaataaattctttccactgcacagtacacggatggcacttcttgggctgtcagagatagagaggagccaaaatacggttaaaaatactgatgctcattttttgaaagaaaaattctcagcacttctgcatcgcgctgtgatttaaaagtgtttgtggttatattttctgaaagagtttccttgaaaaatgacagaaggtctctatctcacagccgtcctcataaacaatccctttgtgaaagtcttaatttacatacaacagtgagaacaaggatcctgtgctaattaaggtctggggctggttagcaaattgctataattgtacattctctagcatcctgtctctgaaaacacatccatacccccagcaaatctcagcaagaatgatactgttcaagattttaatatcctgggcttccgctgcatctgtgcgtgtttccaagtcgttcattcccttgtgccggtgacattacacagacatttttaaaaatggtttcagctttggcaggctggcatccacacaccacaagcactaccacaaaacgcacacatggcaggatcaagacgcaagcagcccaaacaggggagcctttgtatggagacgtgaattcaacccgcggagtacatcatttctcaggctgcaaatccctggccttcaaggcgcttgttctgactcacgcatggtgaggccaaattctgcaatgaattgtgccttggccagtctcgcacagggaatgcaaaatgacagccctcggcttcttctgacccggaaatgcgttttgttgggttcacgcatgatctttagagaagccagtctacacagaccacatttctaaatgaggcagttttacaggggaaaagaaaatcccagctggccacagcggatgagccatattcctgctggtcagcaatcagatggaggcaccctccccactttggcacactctcccattcaccaaagctccccttccccctgcatccccagatgccagccacaatcactgatctacctgctgggcccttcaggcatttgacttgcaacccttggaatacaggtcatggttaagtacaaaggtttaaaatctagggacattaaacactcttatcaaaaaaaaaaaaaaaggtttaaaaatcaaagggccagccaggcacggtggctcacgcctgtaatcccagcactttgggaggccaaggcgggtggatcacctgaggtcaggaattcgagaccagcctggccaacacagtgaaaccctgtctctactaaaaatacaaaaattagccgggcgtggtggcaggcgcctgtaaccccagctacaccggaggctgagacacgagaatcaattgaatccaggaggcggaggctgcagtaagccgagataggcactccagcctgggtgatggagggagactctgtctcaaaaaaataaataaataaaataaaataaaataaatcaaagggccgggagtggtggctcacgcctgtaaacctagcactttggaaagccgaggtaggtggatcccttgagcccacgagttcaagagcagcctgggcaacacggcaataaccctctatataattaataaataaataaagataaaacctgaccctagttccatccctactttgacacttccttaattcatctgagcctcagtttccttaactgtaaaatgggaatgacacacccacatcatggaattagtatgaaaattaaatgaagtaatttgcatatcatgccatgaagtactcagaaaatattagccacgcaaacacacctggcatcgagatggcacttcccattgatgtaggagcatctttcagcaggatcattaccctcggacacaaatgtcaacctgacatcttgaaagctcgaaagctttgtctcctgagagctaaaacgctctactaaatgccaaggctggcataatggcaatgactggcttgggaattactcagttaataagtgagtatgtgtcaaggggagaggggcgtaaaaattgaaattcagttagagaaactgaaaggtcacatggactagatgtaggaataggactgaggaattctgcaccaattattgtcagagtttctaagtttcccaagaagaggacggctcagcacctgttttctaagtgcaagtagagaaaaacacgttgccaggttcataagatggtagagtggtcaccttatctccttttgaggacccatctctttcccagtggggacagcgttggtgggtccaggtgtccaggatattagcccttccctggccagagacgtgcacatggactttgcgctattgtccctgaggaggctccgggctggctctactcccgagagtggcctggacctccagccttcccaccaatgcagtgggagcagcttcacaccaacagaccacctgcagtccatccctttcctgctcagaaccgaaggaccctgacccgggtcatgtcacaggggaacagagtccctaaacttcccaagaaaagcaggctggaggaaaaaaaaaaacatgttcactgagcctggagatcatcccactgcggacgctgagatcactgggactgaacaagagataaggcttcatcccggtcagcttcacagacatcatattttcaccatgcagacttcagctctgggaacctcagcaaccccaatcttaaccccaggactttgaatattaagccaagtggctccggcagaaaggtgctctggaaacagaagctaccaccaccgccactcactatggggcacgagagctcagtttcacataacgacaaccaccccagagaatccttggggaaagttctccctcaaaacaaggtgatcccttcccctcaatgattccctaccaaagcaagaattcccaagcacccgagaaaatccttccaaacacctgcagaatggcttcttcaaatgtcacagaggccaacaggacaggaagcttgcagggcagtgcaaagcactggactcctagatggagagaagcaaattcctatctggtcccgagcctgcctgctgggcaaccctacacaattatttctttttttttttttttttgtgagacagagtctcgctctgtcacccaggctggagtgcagtggcgtgatcttggctcactgcaagctctgcctcccaggttcatgccattttcctgcctcaacctcccaagtagctaggactacaggcgcccacctccacgcccggctaattttttgtatttttagtagagacggggtttcactgtgttggccaaaatggtctcgatctcctgaccttgtgatccgcccgcctcggcctcccaaagtgctgggattacaggcatgagccacagtgcccggcccacaattcttcactgtgccccctctaagcagggggtcttccgggcatggtttcctcatctgcctccagaccttcttcctagaggctgcaagtgggggaaatggcagaacagtcattctcaccacctgacagacctagcaataaaaattcactgtctctaagttgatgcaaatcatagctaacatttttgagcagccaccctgtcccaagaaccattcttttttgagacggagtctcactctgtcgcccaggctggagtgcagtggcgcaatctctgctcactgcaagctccgcctcccgggttcacgccattctcctgcctcagcctcctgagtagctgggactacaggcacccgcgaccacgcctggctaattttttgtatttttagtagagacggggtttcaccatgttagccaggatggtctcgatctccttacctcatgatccgcccacctcggcttcccaaaatgctgggatcacaggcgtgagtgaggcaccacacccggccccaagaaccattctgagcattctatctgtgtgagcaaagttcatcttagccataaccttctatctttatcatccccatttacaaaaggaaacctagccacaaggaataactcagctagaaagggggcaagacagaaccaggaaatctggctctagaagccaggtggtttttgtttttttttgagacggagtctcactctgtcacccaggctggagtgcaggggcacgatctcagctccctgcaacctctgcctcctggtttccagcgattcccctgcctcagcctcctgagtagctgagattacaggtgcctgccaccacacccagctaattttctatttttagtggacactgggtttcaccatattggccaggctggtctcaaactcctgacctcatgatccgcctctcaaagtgcttggcctcccaaagtgctgggattacaggcataagccacccagccagaagccaggtgttttaaatctcaatgacaccttgcctctcaaatcattggggtaagtaagaatggtggtccaggggtgcttaaagagggaacttgaaaccatggtgcgcacttacagtcccagctactcgggaggctgaagcaagagaatcacctgagcccaggagttagaggctatagtgtactatgatggcaactgtgaataaccactgcactacactgcagcctgcgcaacacagtgagattccatgtcttaaaaaaaaaaaaaggccggaggcgtggtggctcacgcctacaatcccaccactttgggaggctgaggcgagcagatcacttgagatcaggagttcgagaccagcctggccaacatggtgaaaacccatctctactaaaaattaaaaaattagctgggtgtggcggcgtatgccccagctactcaggaggctgaggcaggagaatcacttgaacccgggaaatgaaggttgcagcgagccaaggtcaagccactgcactccagcctgggcaacagagcaagactctgtctcaaaaagtattttttttaatgtaaaaaaaaaaaaaatacagcagccagcattctagcagagtaacaaataagaaaatacaaagtgaggacaaaggctataaacaaaatcagagggatagaggacgctctggatgctggaaatgtttaattatcttgatctgggtcagggccccatgagtgcgaacgtgtgttaaagttcatcagactgaacactgtagatcaggttaaaatgtaccagaaaatagtaaacaaacggtggacagtagaagccagccttctcactgttggaggaggaggttacagagaaaccagggaataaggctagaatgatccatgtggtaatgcgaaaaggtcaaacgagagaatgaactcatgtttagctgatatagacacagatggatacatgtaaaaatgtttacacagtatgtctatatatccttccttgtctactgagaaaatctagaagcaaggtggctcacacctataatcccagcactttggaaggccgaggtgggcagatcacttgaggtcaggagttcgagactagcctggctaacatggcaaaaccccatctctactaaaaatttaaaaattagccaggcatggtggtgcatacctatagtcccagctacttagaaggctggggcagaagaattgcttgaacctgggaggcaggggttgcagttagctgagagtgcaccactgcattccagcctaggtgacagagcgagactccatctcaaaaaaaaaaaaaaaaaaagaatctagaacaaagacattccagtagcaatgagcacacacttggccaggtgcggtggttcatgcctacaatcccagcactttgggaggccgaggtgggaggatcacaaggtcagaagttccagaccagcctggccaacatagtgaaaccccatctctactaaaaatacaaaacttggccgggcgcggtggctcgtgcctgtaatcccagcactttgggaggctgaggcgggtggatcacgaggtcaggagatcgagaccatcctgcctaacatggggaaaccctgtctctactaaaaatacaaaaaattagccgggcgtggtggcgggcgcctgtaatcccagctacttgggaggctgaggcaggagaatggcgtgaacccgggaggcggagcttgcagtgagcggagatcgcgccactgcactccagcctgggtgacagggcgtgactccgtctcaaaaaaaaaaaatacaaaacttagccaggcgtggtggtgtgtgcctgtagtcccagctgctcaggaggctgaggcaggagaatcatttgaaaccaggaggcagaggttgcaatgagccgagattgtgccactgcactccagcctgggcaacagagggaaactccatctcaaaaacgaacaaacaaacaaacaaaaacgagcacacttagtgcccacatcttggtttctaatactattctccaataaaagaaaccaggatcctctgggtgcggtggctcacacctgtaatcccagcactttgggaggccgaggcgggcggattacctgaggtcaagagttcgagactagcctggccaacatggtgaaaccctgcctctactaaaaatacaaaaaaattagccaggcgtggtggtgcgctcctgcaatcccagttactcgggaggctgaggcaggggaattgcttgaaccagggaagtggaggttgcagtgagccaagatcgcgccaactgcactccagcctgggagacagagcgagattctgtctcaaagaaaaaaaaaaaaagctgggcacggaggctcatgcctgtaatcccagcactttgggaggctgaggcaggcggattgcctgaggtcaggagttcgagactagcctggccaacatggtgaaaccccgcctctactacaaatacaaaaaaattagccgggcatggtgacatgtgcctgtaatcccagctactatggaggctggagcagaggaattgcttgaactaggaggtggaagtcacagtaagctgagatcacaccaccgcactccagcctcggcaacagagcaagactacatctcaaaaaaaaaaaaaaaagaaaagaaagaaagaaaccaggatccatagagaaatggatgattttagggctgaggcaaagacatacaaaatgagcctggaacatcttatagtgccagaagacaagaaagtgctcaataaataaataaataggccagccgggcatggtggttcacacctgtaaccccagcactttgggaggccaaagtggtaggatcacttgagcctgggaaattcaaaaccagcctgggcaacacagcgagactccatctctacaaataaaaagaacaaaaattagccaactgtggtgatgcatgcctgtggtcccagctacttgggaggctgaggcaagaggactgcttgagtccagcaggtcaaggctgcaatgagctgtgattataccactgcactccagcctgggcagcagaacgaggctgtctcaaacgaacaaataaataaaccccacaacgatggagtctgtcaaggggacacaagagccaacacaaagagctcccaactgccaaagctggaatgatttgagcaataaaataaataagtagtattggattacaacccacagtataaagtaaccatcccagagtccacactgctagagataaatgactgaataaatacatgagggagaaaagactaataccccatacagaagaattctaaatttttttttttgagacacagtgtcactgtcacccaggctggagtgcagtggtggaatcttggctcactgcaacctccgcctctcgggttcaagtgatttttctgcttcagtctcccaagtagctgggattataggcatacaatgtttgttatttttagtagagatgggattttgccacgttggccaggctggtctcgaactcctggcctcaagtgatctgcccgccttggcctcccaaagtgctgggattacaggcatgagccaccacatccagcccccaaataatttatgtcaagcctctgctttcgaggaggtggagcatagctcttcactccttaagtgtgggtgatgccttgtgacttccttccaaagagcagaggatggaaagagaagaaagacagccagatggtcatggtcaacatcaacagtgataaatctttttttttttttttttttttctttttgagatagtctcattctatctcccagactggagtgcagtggcatggtctcagctaactacaacctccgtctccaccccctccaccccgggttcaagtgattctcctgcctcagcctcccgagtagttgcgactagaggtgcctgccaccacacccagctaatttttgtatttttaatagaggcagggtttcaccatgttggccaggatggtctcgaactcttgacctcagatgatccccccaccttggcctcccaaagtgctgagattacaggtgtgagccactgcacaaggccaacagtgatagatcttattaataatacatacccttgatgtgatatgatgaaaatggcattttaccctctgtagtcttcttcctccccaaaacccataaccacagtttaccagagtctaatcatgagaaacacattatacaaatcccaattgacaggacaatctacaaaatacccgaccagtattcctgaaaaccggtaagttccacaaaaacaagaaaagtctaagaaactgtcacagccaacaggagcccaggcagacaactaaatgtaatgaggaatcctgagtgggattctaaaacggaaaagggacttttgtgggaaaccgaaggaaatctgaataagggatggcctttagttggtaataacatatcaaaattgatgcattatttgtaacaattacaccacactagtgtatgatgttaataatagaagaaattgtgtgtgtggagccaggggctaacatgggaactcttggcactatcctcaaaacttttctggaaatctaatactactgttaaattaaaagttcattttaaaaatgtaatagaaaattggccaggcatggtggcacatgcctataatcccagcactttgggaggtcaaagagggaggatcacttgaggccaagggtttcagaccagcctgggcaacccactgcgacctcatccctacaaaaaaaaaatttttttaattagccaggtgaggtggtgtgcacctgtagtcccagctactcaggaggctgaggtgggaagatagcttgagcccaggagattgaggctacagtgagctttgagcccaggagatcaaggatacagtgagctatgatcataccagtgcactctagccaggacagtgcagtgagacgttgtcttttatatatatatttaaaacagaaaataatgaaatgactccttcagactccgtggccaccaaaagcctctttgaggagccaccatctgagataagtctgagatcacaatgagaaatgggcagcctgctcctggcaaaagacacacaggggccccaaggaaggaaccaagaggaaggaggccaaggagctcaagtgaagttgggggagaaatggcacaaggtgaacagaacatcacaaaggaaacaaaggtaaacagggccggcccaggtaggcaggtcacggtgacttcagacctgagtggaagggtactggaaaatcatcagaaggagttagcaaaatgagacagaacctgacccactttttttttttttttttttaagacggagtctcgctctgtcccctaggccggagtgcaaaggcgtggtcttggctcactgcaacctccgcctcctgggttcaagcaattctcctgcttcagcctcccaagtaactgggattataggcacatgctgccacgcccagataatttttttgtattttagtagagatggggtttcaccgtgttgcccaggctggtctcgaactcctgagctcagacaatccacccgcctcgccctcccaaagtgctaagattacaggcgtgagccaacgcactctgtccacttttttttttttaatagagatgggggcgggaggggggggtctcgttaagttgcccaggctggtttcaaactcctggcctcaactgatcctcccacttcagtctctcaagtagctgggatgattggcatgcgccactgtgcctgaccccaatccacgtttttgaagcgcattctggctgctgaagggtgaggatgggagtaggagaaaagagagaaagagacaatggtcactcagcttggtcatgcttggatagaatctaatccaacaccccacttcacaaatacaaaaatgaagggacagagccagtgtccaagccccctggggaaggtaagcagcagaacagggacaagacccccaccctcctggccccctctcttcagtccctctccactttgccccgtctcctgctggaccacatttgattctgaccacaacaagggggctgagaagtggctgagaggcacgtgctcctgcaacatcaaaaacacctctgtgagaaggtaccttccttgctctgaagtccctggtggctcagctctcttcaccatcaatggcactgaaacttcctgccacccagcacaggctgggtcatgctgtgatgagggggcagcagccctctgcctccgcccagcctcctcctgctgctccccagcacacagcacccacccagtaagccaggccttcccacccagggtgcctccccttctgtgacccctgccagagatcagcagccagcttctgcttcccaggtcccagccttgactactggaccctcaactttgccccaaaatgacatactgtctttttttttttgagatggagtcttgctctgtcgcccaggctggagtgcagtggtgcgatctcagctcactgcaacctccgcctcccaggttcaagtgattctcctgcctcaacctcctaagtagctaggattacaggcgcgtgccaccatgcccgactaatttttgtatttttagtagagacgggggtttcaccatgttggccaggctggtctcgaacgcctgacctcgtgatggtccgccttggcctcccaaagtgctgggattacaggcatgagccaccacgcctggcgacacgctgtcttgtaacaatcctcaaaatgcttttggtttcagacgcctttagggagtcactttgtgcgacactctgcagccaaatgagaatctccttccggcagtatgcagtaaccctgtccagcctcttcctccctccccataacccccagtgcaaggctgtgtgttccaagaaagcactcagtgacttgttgaaggaatgaaaacaccttggtacaaccattaagtttggagatgagccttttcatcaaccaaagatacgaaaaatactccagtagctcatttgtgaaagcaccctgaaggtaaaagtgaataactgcttcattttgggaagcctcataaaatctctttcacaaagaccaaatgaaaagtaccaatccctcaattagaagatattcaggagtctactccaggcttgtgaataaacgcataaattgtgtttgtcctaatttgctaaattttgaactaaatgcaaacactggccccggcatcccagcaagctctacatttcctttttatctctaacccaagaccaccactttccagtgaagcgggctgacttcatcccacttctgggattccaaagaggtctgttgttaaaatcagaaaacgagcagcagctagaggctctggtggcttccagaacatgctttatttaaactgtggctcctgaaagtcaccctgcggagaggtagccagccaccctcagtcatgacacacaggtaaaattcactgtcaggacccctacacaggcaccagggaaagaaaaccaaaaggaggagagttctccatcaattaggttcatccatcaaaaaatcttatatctgaaaatccaagaagagttacaacgtcggctcagagagccacacacttcactgcactacaacaacaaaaagaaattccaatttcctccttagctctagaatagataatacaagatttttactcacctttggagcgagtagagatatccatgccctctaccacctcctgttctgtttttatttcctcttcagccaagctgaaacagagcaaattatgttcatgtttaggaaggctgagaacttgccccatgggggcagctatttggaagttctagcaacaaacacaccttaaagacattccctcatccttatccagggctgggggaggaaacccacacctgatttcaacaaagtgtgaagagtcctaaaggagttttttaaaacactaggttgttctttttttttttaagtcaaattactattccagttgtcatgctattggggaatgcaaaaggcaattttttagacacacaattacaacctacccctgtgggccaatgagaacccagccttcaaataaacaagcttctcattgttaacacagggttcaaaggcagggaggttggaggtgttttgcagggtatccagaattctgatcgctgaatactttagggcaaagagtaagatttcccacacctccccctaaatcttacaattccctgatgaggcaggaacatgggaaaaaaaagatacaggttaaattacaaagcagaaaaatatgcccagctagaagctaaagacctggtctcaaaacactgaaccgaggagcactgattccagcaatcagactggggtctccacacttccaaccccctgaatgcttcctctctacagcaggcacggcttactactgagttgtgactaattatcccccaccacaaaagtggaatgaggaaggattattcaaaagacaaaggctaagagtggagggttggggagagaagcaaataaagcaagcccctttgctgggagggtccgtcacccagaacattctctctctctctctgctggaactagggttgaaagagagccggccatatcagatcttcctcccacagagaactcacaagctaaaccaaagggaaaaaatagagttctgctttcatagatgcaaatggtttgaggtgctagaactttccaaacattcaggctgacactgaagtggtaagaagctgggcatttactccagaagcaattccatcagactgtcgttccacaggaagaaatgggtgcatcaccaattgatatggctggaattttccatttggaagactcaacgccaggacaggaaggaggctggggaagagagaatgtcctgtcctggggaagagagaatgttccgtggtctgggactgtgacaacgcaaaaggcccaaaaagacagcctcatgtctcgaaccctagtataaggagaagattttaggagagttccacgttaggaggagaggacttaggatgggagctagatagaatggaaaagattatagttcagagttaaattataggggcttggagacgaagaaaggtagttgggtttaaatgagaatattaacacatttagccatctgattttgaaccccgttaacaatttcatttacaccgcatctgtaaagaaagcctgtgacacaaatcaccaaagaaacaactgacatgttgtcacaaatggttttcatcaggagaaagcagcctgctaaatttaaacacatcgcttatatgcaataatacaacggtgatttattgaaggttatttcagcactaatgctttctattccaacttaaggagaaaacattctcaactcagaaacactctgcctgaaacatacacaggttgtccaactggatgctgttgatgggttctggcttggggtgactggaaatacatcttaacaaaaagccccatgcagccctcggagatgggtagacagttaacttcaaaggaacaaatagcaaccttgatcttttctagcaactagaattctgtttccctctctagcatgaagtatgtgaaattctaaacttcttgaaaccgatcccatattttgagtaatagagaaaacgctaatctgtgatccaactgaaatctacagtggtgagggaaacaattatgcagaactgagccaaaaaaaacccacttgaaggatttctgcagcgatgaaaacattcaaaggtgtattgatcatggaggaaggctgcattcaagggaaccattatttggcttgtaacagcctagaggagctgaatacttcaggcaggaatgctgctgagagacgaggaaaatgcaaactagttatgtggtggctatttgcttctgagttttaagataatcaatgctggagcagaagagagagggaaaaaaaagttaagctgttttatctttccaagtattacaagtgggcaccataatcacccaactttagcaatagcaccaccagctttagcacagcatttcaagcacaacaatttaagaaaaccatctttttcacagatcagcaaaccatcctttcaaaaggaacccgtgcacacacatgcacgcacactcacacacacaattaacttgtatttgactaaaggaaactgcagtgtctatgcattaaaaggagaaaaaaaaaaaaaaaaaaaaaaaacttcatttacaaaagcaaagaccagaatgcaaaattagtcattttgaatagccacatctaaagggacttcctttttcctacaccactgatttcggtttttttgtgtgtgtgtgtgtgtttttttttgatttagtgttaagaactagtatgttattaggaaaaaaaaatgaatattacatcaaaagtaggcgcaagaaaagatctgtacctgtctgaattgccccactgatgttggtcaatttaggttaagaactgttcagtcatttgggggaaaaaaaacagtcaaataattcttaaaaagaaaaggcagctgcatctggagaaaatactctgaacttctgtcattaacacattaaagtcttagaacatagacagcttatttccttccatatctgctagcttccagcaaccctgatgatttaaatcaaaaacaatgggacaacaagctcttgtttcaaactgacattacttttttccctttaaaggtctgttgaggaaactgggggcccgctacagaaaagggtaaaattagctgaaaagcaaacaatttctcactccaataggaaaatacaccatcaactagttagatacattgtatacaccaccacctcttacactcacatttacccaagtcatttgcctgcagatttcacaaactgatacatttgaggcaattcaaagaaataacagtacctgcaaagataaccaagaccaccccatcccatcccaaaaagaataaaagatttctcccccagtgcctgagcaagaaaacctatgcttacttcttaacctgcatgcactgaaaaaagagcaattaaaagttgcagatgaactactgcacctccaggatgctttaagccttctgattgttaattctgaggactcagggatggtccgtaattcccaggaatctcatctcctcaacacttccaagagagagaaaaaagaaagcatctagttttgacagaaaaatgcctgaatacacaatgcccacatatttcttttccccaagtgcccctactatttgacttttaaagaagagtatctaagccatctagaatatataaccaacatgcacaagactctggttctacagatgaggatcatcgcacagcaattcaagaatcatgcatcattcgaaaggacttttcctggtttttacttttcattcaaaataccaaaatggtccaggctgtaagaaatatttaatccccaaggcataacatcttcctcttctagattacaaaatagtgaacatcaaaattaaaaaccatgcttccctaaatctacaattaattttttaagaaattggggtgggggggaatggttagcagagcagctttatataagcactcacctaaaacaggcagagtcatcggtagctaagctatttatgcaggattcttaaaatggcgtctggcaacactgcctcattcctgtgttgaagctaaaatggtagcagtttgttcaatagctgtagctcttgtttaagcagccctgcgagtttcaaagccaccttcctaaataccagaactaggaaaagctgaaccaaaggacaccaacaacccaacgtttagaagcttaaaaaaaactctgcaatgacagggagagtttgtgaagtcacaggttcctaaggaaaagccttctcttgtagatcctgagccttcaacatgaggctctgtgatgaggcccccttgccctcaaattaggtgggtagaaggttaggaatcgtgcagccccgtggcacaaactgcagacggacaggtgtctgtgcaaacacaaaaatgttcccagggagcagcctgggggaaggcaaggaggaagcccggtcccccttctcttctcagtctattagaaaccagctttgcatccataccaaaaaggcgctaggtaaaatgaaagtgcttcaaggacagcaggcatctgaaaagccaagctaaagggctgcacctcagtctacggcaaaggtaaaataaaaaggctgtttataagcctgcaaacagccaccaaatacccagccctctgaagcagccagtcctaagacagttaacatcaaggaaagacaatccgagtctgcagaggagaaacacaaggaaaacattcccttatccaatgcacaggatactcacaaattagatttctgaccacccccaacagagcctgagaattaacaatgggttttgcaaaacccgctttcagaggccgaactaacagcctgagtggataacgtcatttactgttacaggtctgagcattggcctcagaactcctctggtgctgggagtgaggagtttcaaggtgactgctttttagctccaggggagaaaggagggcacagtgcccaaggccatgccagggcaaggacgggccactggcccccgccggccggtaggtaaggtaatcgggatgggggggacaggctggcagcacactggctgcagagctggcatggccactgcctgtttgtttgtctgcaaggagagtgggaagtagcggggagggtgaccataaccttagcaacctgaagccaagggtgaacccttgctcagatcttgcattttaagagtaaccaaagggttctgaaacatattccctttttaaatctctgctgtgcagtagcgaaggcccctttgaatgtatctttctttccagagtcaaccagaggcaaagccagattgagggttcccaggctgacaaatgtctgctgcctctgccacaggagagagaaggggaaagagggcaaaagaaacaaagacatcacgcgttgcaagtggctggacttttaaaaacctacctttgcctccagggttttctaggttactgtcaccccacttcctaaaaagtgtctcccccctcatcctatttaagacctgatgcagtctccccactggttctcccagggaaagaaaaggggaaatgttttgttgaaaataaaagggatgacaagaaagaaaggaaaaaaagctattgttttcatccctaatttataatccaagaggcccccaattgtttctttctgactcaaatctttgagctgttaattataaaagtaactggacttggcgccaacgggctaactatgatcaggctcagcaattagaaaaactctgtagaaagtttactgagtgattatatataattaattcctagttacagactgaacactgaccattttctggagctaataaaagcagttactccccctcccccacgtgaatgccacttaatttcccaaagcagaaagtgaatccatcctggagggtcttgaaggaaaaaaaaggagaggaatcaaaagcttcagtgtgtctgtgtttgctccttgcagctgtgtatcctctttggggactgaggaggcagaaggaaaaaggaaaacagcccaacattctgttcctccttctgcaatttacaaacgtggcagagagaacattctaccttgatgagaaaaagaaggggggttggggggaagcagggaagggagatgacctaggaatggaaggtaggagacgcttctgcttggcagatctgcttttcctaaaaggaacaaagatggtagaaatttccagaaggcccgttcttagttcggccactgcaattgtcaatctttaacctttcctccaagtctattggtttaaaagctagagtagaagaaccccattgggctgctctgggagccagtactgccgtccctacctagtcctgctgcaatgcagacatttatttttttccccctttcctgaaactggaaaataatgctactttgaaagcaattaactttttacagactcatgcttggtaggggtcacagtaccagaggaaaagtggctagcttggtccagggttgggaacttgctgggggctgtacatttgaaaacagatcttggctctccaaacctgtgggagccattttaatgcaagcttttagaggacaaatgccttgcccttaagttcccttccagcccaacaaacacagtattatgcaaacgttgaaggcaccaaaccaggagtcttatgattagatattgcttctagggaggccacaagaacctcgatatgtaatttccatttacagcaaggagataagaacaaagaaaatagctgagtgtctgaacttacttgtttggggcagtggcactgttcagttttaagtatataacatcattaactgcctgcagttttactctaagaagctaagctggcctgccttgcacagacttttctcaacttagaatgtggtacgtttctgctgattaaatgagcctttttccaattcggtgtcagaaagtgggctactggacactcatttgaaagaaaaaagattactgactccataaagttgacataacacagcaattgaatatatttcctgcatttacggtcatgtcggattggtctccaagctgaaaatttatgtactgaacttctagggaaattctgaaggtactgctaaacaagactctacttttcccacttaacttctagctgcagccttaagtggtcaagggaaatgtaaaaagtgagaaatcttatgtggggccagcatgcatacagatgtgtggaggagacctgaaaaaaggccaaaatgtgttggtcagtgagtcctgaatcaaacccagtctggtggtagatgagattttgcactatacataagtcctaaaacatgagcacactgacaccacccccccaacacacacataccaccaccaccaccagcttctacaccaccaatgtttttagggctctgcacctctaagaacaagcagtttcatgacatttcacaagcacatcacctactcacagtttgaatatccaaacaaaccccattaaaggtctagagtcaagtcacaatgaactgaacatttctcccctgactcagggtaaacaggaagtataatcttcaatcctagctgcaggttatcaggaaaaacagtggattcaaacagtcacctaaaatcaagacactctttaaaaagcccttattttgttcctgctaatgaagcccccaactcctgtagccaagacccactattacaaacagaccccaaatgttcgcaaaactcttcaaacatggtcacagaggaaatggattgctttacttacccaacaaatgttcaagcaaccgtctcatttttccacagttaggaagagagaacaggctggcagatttgggacttgatcaaaaaggaaatttttttaaacagttacatggtattattaaaaacacacacaacaacaacaacacaacccaacaactgaatatggaatgctgtcatgagccacagacatgattttatttcctctacactccatgacacaggagaagagaggaggatacaatgtataaaagggacaggaaaatgaaaacaaggataaaaggtaacattagttccttgaaaatcatgcaagagtagaaagctaagggattcagaatccttgcagatttttttttttttttttttttgcaggatgttgtccaagatctctccccccaccccccagtccccatccctactccaaaaaacttcctccaaagcctagaaaacactttcagaaacatttgctggctgtaggctggcttgcagaacactctgtagcaacctaagtcaggaaaacaggctgaacaatgtagtttcaagtgcagaagctctgtagaataagagaagaccgtgtacagacaccaccacccacctaggccccaggagctagactctccttagcactgctctgctgagggcacaattcttttgcaaacacgctcctctcttgtcaaaacttatccagccttcccagaacctctttggagaggcaaacttgcctgctctgctgtctgccatgagctctccttggagaggagcctgtttgcttaccttccattttcttcccccagcagggcatgtggcaaaagagaagacaatagtgcaggggtgggagggggggaactgctcagagagagagagaggggaagagagagggaagagggaaagaaaaaaaaaaaaagaaggaaaaaaaaaagcttcttttttggcataccaggatctagcttcaaactcttccagaaacaccatgccctggtggaaggaaaggtgtgccaggcccttgccagtttgcaaaatcaagctatggctaatggctactgagccatgtgacccaagaaagcaaaaaaattctctctaaacagttccaagttaacataagtgctctgggggtgagtgtggcacggccagccacagagaaatcacactgctcgcccacaattcggatgtctcagagggagggggaaaaaagatggttaaaaagtcgagcttacctctgtggatgcattgttaacactgtgtaatgtcaatacttataaaacatggaggacaggctcctagttctcacagaaaaagggtttggcacttcggctgatgatctggccgcctaataaaagctcatccccgattggctgccccggcaaatcggagtgtaaagccgccccggattggctgaaacacttcctgagcgattatctttgtgaggctcgggtgagcaagagccatcctgtgcatagaaaaagacaggctaagctaggccttttgcagcaagaaaaacttgggaaaggggcccccacacgcacttctcctgcaccctggctagatttcccggcacgggccagccagggcagccagcctgacctgctccaggaaagcctgaggcccggaggtccctgggaagggagtttcttggagtgggctggaacggctcaccctcacctgcccccagagaaacggcccttgtccagggaggaaggccagcctttttctagaacagtccagcagggtggctctccaaggggaaggggaagctggggagtggggagtcccggggaaacagccaaggggccagaaaaaggggcttgaggcaggcctctgagaagctgggggaagcaggcagcccgggggagccccgaaaaatcagcagagagcagccctggcttctcagaggagcgaggagtagctgctgaggggaggaggggagcagagtggtcaagtttgcatagtcattgtccccatgcctccttgcaaggcaggccagggagccgtgggcctctcgcgccctgcttagccagtcctgcaggcaaaatcaacgtgggttcctgtcgccctgccacgatgccaagggggacccctctcggtccttaccctaagaaaaacccaaagccctcctcgcaggccacatgcctggatctacaaacttcccttccctcccggcccctcccccgcggccgagacctgctaaacctgtcagttaaacacaaatctgacttccgtattagcctgcgatgccttcggcttcctgcctgttaaccctctctcggactcggggcctggctgggaaaaactaggccttgagatcgcagcgaaggcctgtggaaaaataccagctgcagctctcccggcagatgcagaaagagagagagagagccgctgtctctcagcctttgcttcccagggaggcgtgtaccttgtgaatccagggcacaggcagtgcctctcgggctgagaagccatttcaatccagagggagacagaaagatggcacgctcagcccggaaacaagagcccccattatgcgtcaggcctacccccgtaggtcagcccttcctgccacaatcatccctgtatgtgtgtgcctgggggagttgggccctcctcggtgggcagacaaatcccctgggcttcctaaggattcttgcttccatttatttgcacagagaacggcttcttttcgtcccccaaggcagatggagcagcgatttcacacacagccctccatttggcagcccccccacccccccatctctggcaccgctccccagtaaaatattaactggttgttcagagctgcttacaattctacccacttcaattgcgttaggaggtctttgctggtctcctccctaaagctgccttcgcagttggtctgtacccagagatagaaaaggaccgtaaaatgtccccagctttctcgctctctttccttcttcggcattttaaatgacaaggtgcttaattaacaggattttttaaaacagcaacctggaaccacagaagctaaataaacaccattctttagaggctggagaaagcgtccagagttaacgcagccatatgccaggaggcataactccggagcaataaagtctcccctctcctcctaaaattaggacttgtgggctttcttgtcccacacggttcccacaaagaaaacgaagagctgatggcttgctttccctgcccccccccaacccccacatggacaacagatgcccactgcttgtacataaattcttcctggccgggaatctcatatcaaacaggctcaggaacgagctgggaatcgaaactcactgtacggcagggcaggacccaggctttataaaaacggacaggatgttgctgttgttactgttttaggctgctgaggccaagctgcagggagggacagctccatggccacccaacctgacaaagctccagggctcaggacagcaggcctgggcctcaccaaaagggaggggcctgctcttcctggaggtagaaagctgcatggggagactaaatgggaggaggcgagaggtggaggccacagtgaagcagtgcgtgctcaccctcctagctgtgtgggcagcggccctccaccgccatcccatatggaatgctgtttgtttctgcgggtgctgctttgaggggaacaaacaggactgtggggttggtggcagatctcccatgcagctaagtccacgaaccaatgaggaaataaaatatgccgctggtgtgcgtggtggattttaacctgggattaaagcttgttgcataagcagctacagcatcctccccgcctccctccctctctctgatcacttgatcacttgaaatgttttctggggcaaagagcaggaagctgctggcttattctggcagctctgctctgtttgaggaatgctgttggcattcgggtaggtctgaggttatctggaaaacagcaattcggctggggacagacacaaaagtatggtggcagatggaatcctgggaggaacacagattgaaaagaaagcctggggcaggcctacgaagggctggtcctgggcttcatggaatgtggctgataagcaggaaataaaaccaaatgttgcaggtctcaatctagaaatccattcagcagctcctcttaaagccccactgcagtgagtatcccagcagttacttctaaattagtgctttacatagactgattcctgaagtaggtggcattgttagaaacctggaactaagcccagagaggtgaagtgagctgcccaaggtcacacagctgggaagtgccagagatcagatgtccaccccgttagcacttcacatccctaaactctgtaccttctcctggctctaaagaaagaagcaaaagcaaagccgaaccaagcacagcagaaacaatgaggctgaaacctacgaacagcaactgcataatctgtgttttcttttaggaggtagaccagttttttgcttttttgttttttgatacagtgtctcgctctgtcgcccaggcttgagtgcagtggcatcatcacaactcaatgctgcaacctgaagacccacccttttgaggtgggttttcagtattgaatgatggcgctgaaggaaacttttagattagactcattcaaatgcccctcattacagattgaggcccagaggaagcgaccctctccctcccaacctccagcaagatgcaagatgtcaagggggaacactttgccatctctaaaattaggcttttatattccctgaaaccagtggttcaaccatggggggatttgcccttcagggggcatttggcaatgcttggagacgtgtgggttgtcacagttagggaggttgtattaccggtatccagtgggtagaggccaaggatgatgcaaaacatcctataagtacacaagaccagccccgccacaacaaggaagtatctgatccaaaatgtccaaggttgggaaaccctggctttaagccctttaaggaaagggaagaaaacagtccaatcattctgcctctggctagaaaagccagcacaggcctaaacaagcaggttctttggtgatattaataagcaatgagctaataaaaatagattaaaacgtgtctctcttaatattcccagggtacagagaggattggggtacagaatcaggctgtggggagccaggcagagtgtcacagtaacaacactggtctcgagggagaggaaaggctggccccagctcccttcccccagcaccttacgagctgaggcctggcctccctgaaatggctcgcccgttccgctggcctccagccaggcgagcagcagcaggagcggccccacaagctgcatcccgagatagcctgttcggctgcctacaaaaataagcacacttgcagttatcggcctccagctacagcaggcctctctgaccgttacgcgaaatggacaggattgagtcagggaagtgttttaaatatcttgttttgttttgttcctttctggccaattagaaccgaggccaacttcgggcacggtgacagaagggctcaccttcagagcccggagctgactgtgtcatgttacagccacaaagaggcagataggagcctccctcccttggagaagatgcctactaggagaggggtgtggggttttttggttttgttttgtttttttacctctttctaggagggactggcaggattaggcaaacggcgggagggaaaacaaaaagggctagtggaaagggcagggggtggatggtcgcccctcatcaggcagatggccacagcgcgggtggggcgccgagcaagggatgcaggagcagaaggaaaatgaaaagcaggaaaactcaggccctactcttttttcttcctagcaattacttttatgggcagaagactatagattcgttcgctctgtttctccctcccactggaccggtggttttgcccccgcaaggggacatttagcaatgcctagggacattttgggttgtctccattttgggttgtaagatctttcagggaagtggggagtgctactggcatctagtgctgctaaacatcctacaacacataggacaagaccccccagcggagaattagccagcctcaaatgtcaatagtgcagaggctgagaaactgtgcaccaggctgagcacttcacgaggcaaggaaggaccttgtctgaattcttcaccatcatgccctcaagagttgaacacagcacttgacatatattagagctcagtagaacaccatctcccatccggatggttgcaagaatcttacctgagctctctgcttccgcccttgcaaacgcttgtacacatgcactcacacacacatacacacactgtaccacccaggctgccagtgatccttttatttttttttctctccctttttttttttttttttttgagacaaagtctcactctgtcgcccaggctagagtgcagtggcacaatctcagctcactgcaacctccgtatcccaggatcgtgcaattctcctgcctcagcctcctgaggagctgggattacaggcacatgccaccacacccagctaatattttgtgtctttagtagagacgggggtttcaccatgttgtccaggatggtctcgatctcctgacctcgtgatccgcctgccttggcctcccaaagtgctgggattacaggcgtgagccaccatgcccagccacttatttattttattttattttttctgagacacagtctcactctgtcgcccaggctggagtgcagtggcgccatctcagctcactgcaacatccgcctcctggattcaagtgattctgctgcctcagcctcccgagtagctgggattacaggtgcaaaccaccacgcccggctaatttttttttttttttttgtatttttagtagagacggggtttcaaatttcaccatgttggccaggctggtcaggaactcctaagctcaagcgatccgcctgcgttggcctcccaaagtgttgggattacaagcgtgaaccaccgttcccggccagccagtgatcctttcaaaacacaagtcagctcctgtccttcctctgctcaaaatccatcaatgactcctatttctcagtaacagcccaagtccagataacggcccaccagcctcccggctggcactgtgcccttctgacctccgaccatctccctccaccctcctgtggctcactctgctccggccactccgatcatccacctgttctttccattctctaacttgttctctcctccttggagccgtggtacttgatcttctactctgacccttcctacaatcaatggatctgcccacttccccaaaccacccagcagctagccatttcctccgcggggcctcaacatgtctgtatcttccctgctgcttctgaaaggattccccacagccgacaaggcctctcttctgctgcaccctacatcagatatctttccatctgagccctggcttaaaaactagccccatttctcttgcacctgtaacctttttcctctctcttccccacatcaagaagcacaactgtgcagtgattgagtgtgtggctgctggtgccacactctctgggtgtggatcccagccaccccacttgccagctgtgcggccttgcttgaagtactaagttctctgtgccttgattttctcatcagtacaatgggaacaaaaataaaaagtgcctggaatcattgaataaatcatctctaccaaaagcttgcagcaacgctgcacagagtcagcactcatttagttgctgttactatttccctcttggcttactcttatttttttttattattattattttttttttttggagatagagtctcactgtgtctcccaggctggagtgcagcggcgcaacttcagctcactgcaacctccacctcctgcgttcaagagattctcctgcctcagtctccagagtagctgggattacaggcgcgtgccaccacgccgggctaatttttgtatttatagtagagacggggtttcaccatgttggccaggctggtctcgaactcctgactcaagtgatccacctgcctcagcctcccaaagtgctgggattacaggcgtcagccactgtgcccggccatcagatacgattttaaacgctttacatgaaccaacccatttatcctcaaaactataaagcaggcaccattatacttatcaacccactcctatatgagtaaactgaggtcaggactaaccatcccattcttttttttttttttgagacggagtctcaccctgtctcccaggttggagtgcagtggcatgatctcggctcactacaacctctgcctcccgggttcaagcgattctcctgcctcagcctcccgagtagctgagattacaggcatgagccaccatgcttggctaattttgtatttttagtagagatggggtttctccatgttggtcaggctggtcgcgaactcctgacctcaggtgatccgcccgcctcggcctcccaaagtgctgggattacaggcatgagccatcgcagccggattttttttttttttttttgagacggagtctcgctctattgcccaggctggagtgcagtggcgcgatctcggctcactgcaaactccacctcctgggttcacgccattctcctgcctcagcctcccgagtaggtgggactacaggcgcccgccaccacgcccggctaattttttgtatttttagtagagacagggtttcactgtgttagtcagaatggtctcgatctcctgaacttgtgttccacccgcctcggcctccgtaagtgctgggattacaggcgtgagccaccgtgccccgtcctgtttcccagactgcagcgtgatggcaagatgacagctcacagcagcctcaaccaccttggctcaagcaatcctgccacctcagcctcctgagtgtctggggtcacaagtgtgtccaccacacacagctaattttttttttttaattttttactagtttttttgtttgtttttgagacagagtcttgctctgtcaccaggctggagtgtggtggcgagatctcagctcactacaacctctgcttcccgggttcaaaagattctcctgcctcagcctcctgagctgggattacaggcgcatgccaacacgcccagctaatttttgtatttttagtagagacgggatttcaccatgttggccaggatggtctcgatttcttgaccttgtgatcctcccgcctcggcctcccaaagtgctgggattataggcatgagccaccgcacccagacttaattttttatttgtaagagacaggggtcaggctgggcacggtggctcatgcctgtaatcccagcactttgggaggccaagacgggcagatcacctgaggtcgggagttcgagaccagcctgaccaacatggagaaaccccgtctctactaaaaatacaaaattagccaggcgtggtggctcatgcctgtaatctcagctactcaggaggctgaggcaggagaatcgcttgaacccgggaggcggaggttgctgtgagccaagatcgtgtcattgcactccagcctgggcaacaagagtgaaacaacgtctcaaaaaaaaaaaaaaaaaaaagagacaggggtcttgctctgtggtctgggcagatctcaaactcctgggctcaaatgctcctcccacctcagcctcccaaagtgctggaattacagatatgagccacagtgcctgccggtttatctgctttagatagtgtgggcaggaagtggggagaccctttaaggaggctgtgacattggagcgaagaacatagaaccttcctggtggagggaacaggaagtatgaaggctctaagttggtctgagcttggcagtttgatgtttcagcggaacaaaaaaaggccaggtatggctacaccaaataaggtgcaaagaggctgggtcccatggctcaatcctgtaatcccagtgctttgggaggctgaggtgagcagattgcttgagcccaggagttcgagaccagcctgggcaacaaagcaagaccatgtctctacaaaaaatagaagaaattagccaggcgtgctagtgcacacttgtagtcctagctactcgacaggatgaggtaggaagatcacttgagtcaaggaactcaaggctacagtgagtggtgatcatatcactgcactccagcctgggcagcagggtgagattctgtctcaaaaaataaaataaagtggccgggcgcagtggctcacgcctgtaatcctagcactttgggaggccgaggcgggtgggtcacgaggtcaggagttcaagacccgcctgaccaatgtggagaaaccccatctctactaaaaatacaaaattagccgggcgtggtggtgcatgcctgtaatcccagctactcaggaaggctgaggcaggagaatcgcttgaatccaggaggcagaggttgtggtaagtcgagatcatgccactgtactccagcctgggcaacaagagtgaaactcagtcgaaaaaataaaaaataaaaataataaataaataaaaatacaaatacaaaaaattagcacacgcctgtagtcccagctactcgggaggctgaggcaggagaatctcttgaacccgggaggcaggggttgcagtgagccaagatcgcgccaatgcactccagcctgggcgacagagcgagattctgtctcaaaataaataaataataaaataaaataataataataataataataagatgcagaggaccaggccaggcatggtggctcacatctgtaatcccagcactttaggaggcgaggctgaggcaggcagatcacgtgaggtcaggagttagagaacagcctggtgaacatgttgaaaccccgtccctactaaaaatacaaaaattggccaggtgcggtggctcacacctgtaatctcagcactttgggaggccgaggtgggtggatcacgaggtcaggagttcgagaccagcctggccaatatggtgactcctcgtctttattaaaaaatacacaaaattagccaggcatgctggcgcatgcctgtaatcccaactactctggaggctgaggcaggagactcacttgaacctgggaggaggaggttgcagtgagccgaggtcacgccattgcagtccagcccaggcaacagtgcgagtctccttctcaaaaaaaaaaaaaaatcaaaaattagctgggcgtggtggtgggcacttgtaatctcagctactcaggaggctgaggcaggagaattgcttgagcccaggaggcagaggttgcagtgagccgagatcccgccattgcactcctgcctgggcaacagagactccgtctcaaaacaaaacaaaaaaaagatccagaggacctaagcatggagataagctcagagacaaggtcaccattccctccaccatctttccattactaagactcaaaatattccacaatgttctttaccttcccatccccactctcctctacatctaatccacaccatccctgaacccaccccaaaagagagccctataaaagggtagctagacatgtacactcaagcttaagacagactgactctgcactgtgtagctccagaaccccaaataatttctgtaactctctacacctgatcctccacatgtaaaataggaatactactctctatctcatcgggttatacagtaaatagagaaaatgaattaatagatatgaaaatacctcccacaggtggatcacctgaagtcaggagttcgagaccagcctggccaacatggcgaaaccctgtctttactgaaaatacaaaaattagccaggcgtggtggtggacgcctgtaatcccagctacttgggaggctgaggcaggagaatcgcttgaatccaggaggcaaaggttgcagtgagctgagatcatgtgctgcactccagcctgggcgacagagcgagactctgtctcgaaacaaacaaacaaacaaaaattagccgggcgtggtggtggacgcttgtaatcccagctacttgggaggctgaggcaggagaatcgcttgaacctggtaggggatggaggttgcagtgagccaagattgcaccacttcactccagattgggtgaaagagcgagattctgtctcagaaagaaaggaaaagaaaagccaggcgtggtggctcacgcctataatcccagcaccttgagaggccaagggggacggatcacttgaggtcaggagttcgagaccagcctggccaacatggtgaaaaccccatcattactaaaaatacaaaaattagccaggtgtggtggcacgcgcctgtagtcccagctactctagaggctgaggcaggaaggcaggaaaatcacttgaacccgggaggcagaggttgcagtgagccaagatcatgccacttcactccagcctgcgtgacagagggagactccgtctcaaaaaaaaaaaaaagaagaaataaaatacaataagataaaataaaataatgtattttggctgggcacagtggctcacacctgtaatcacagcattttgggaggctgaggcaggtggatcacctgaggtcaggagttcgagaccagcctggccaacacagtgaaaccccatctctactaaaaatgcaaaaaattagctggacgtggtggcaggtgcctgtaaccccagctactcgggaggctgaggcaggaaggcaggagaaacccttgaatccgggaggcggaggttgcagtgagccgagatggcaccactgcactccagcctgggtgacagagcgagactccgtctcaaaaaataaaaacaaaaaaattatgtgttgtatttgcttttcagggcagcaatcttgtcctttacaagcacttgattcgacggttcatctccagagcctagagtaggtcccacacaggggagtctgttgatttgagtgaacgtcaattcctggggctcagtacaaatgctttaaaacaatttgctcaatactgggcacaataggcttaatgtggccttgctaagttcctggagtgacttctatgggctttagcctcctcctgctgccaccactgcctccatcgccctcctcgttgtcatgacgacatctcctcctcctcatctttaccttggaagagtggcttgcacttattgaggtgccatgtgccaggcactgttccaaacacactttacgtattaattaatttaacccctccaacaaccctatgaggcaggtacaaggataacccccattttacaggtgagaaacctgaggtgcagagagatcaagtaatttacacatctgaaaaaaggaaaacattcataagaaaaatgaaacctcagcctacttggcctctaaaatttcaagaagctaaaactatggagaaaccaacacttacaggtgatcaggaaccaatttaccaacaacagcagcaaaaaatagaccaaacacaaacagaaattccagagagggcaattcaatcacaattcatctcgtgttctgaggccccccaaacctccctgtgttttccatccacctggtccctcaagtcccagatctggacatcacccttgaccaccgcttccccatctcccatcccaagccctgtggcttcaccttctgagcgccttccactgccgactgcggcggcgtagctccattctgcacaggtgcttggctccagagccaccattatctgctatctgggctggaagggaacagcctcctcaccccgactctgctcccatcctccaccctcagctgctggaaggatcttttgaaatttcaatttgggccagatcacatccccatcccccaacccccacctctaaaacccttcacaggtttcccattgttctcaggccacagtctgaaattcttcaacgagccctagggggcctgtaggattcccttctccagcttttgctcagggtctgagctccagccagcttcaaagactgagtgagtttgcctggattcaaatcttggctctgcctttcactcactgtgccaccgcatgtaagtaacttaacctctctgggcctctaaagtggggataatagcacctcctagagtgttgtcaggattaaattaattcatgtagtaaaaagtgctcacttagcacagcatctggcacccagttagctattgctattgttattgctgtcaggtaactcctactcatccttcaaaacccaacacaaaattcatttcttcaggacagccttcccagactcatttcccaaaaaaaatcagatcctaggctgggcatggtggctcacgccagtaatcccagcactttaggaggccgaggtgtgtgatcacctgaggtcaggagttcaggaccagcctggccaacatggtgaaaccccgtctctactaaaaaatacaaaaattagccgggtgtggtggcgggcgcttgtaatcccagctactctggaggctgagacaggagaattgcttaaacctgggaggcggaggttgcagtgagcgagatcatgccactgcactccagcctgggcgacaagagcaaaactctgtctcaaaaaaaaaaaatcagatcctccagttatatggtgtcctcatagtgcccatgacaatcataatttaatactttatacatgtttaatcaccaggtacaaattttattttattttttttgagacagagtcttgctctgtcacccaagctggagttcagtggcccgatcttggctcactgcaacctccatcccaggttcaagcgattctcccacctcagcctcctgagtagctgggactactggcacgaaacaccatacccaactaatttttgtattttttgtagagacggggtttcgccacttgcccaggctggtcttgaagtcctgggctcaagcaatccgcctgccttgaactctcaaagtactgggattacagatgtgagccaccgtgccgggcaggtataaattcctatgatcgagttcttacctactgtctgttttgttcaattctgtatcactctggcacatagtaggtgctcaaaaataatttggtgaatattggacaagagagtagctgaatgaatcagctgcagaggagcccaaatccccacttttcaagttaaataattagaaaaatcggcttttggccaggcgtggtggctcacacctgtaatcccagcactgtgggaggccgaggcaggcggatcacgaggtcaggagatcgagaccgtcttggctaacacggtgaaacctcgtctctattaaaaatacaaaaaaaattagccgggcgtggtggcgggcacctatagtcccagctactcgggaggctgaggcaggagaatggcatgaacccgggaggcggagcttgcagtgagccaagattgcgccactgcactccagcctgggtgacagagcgagactctgtctcaaaaaaaaaaaaaaaagaaaaatcggcttttaatgaggatgcaggaaaactgaagcccactgagggtaactgggttacaaaaggaagccgcagtgattccaatgtaaagcaaaactgggagcgtggcccagagagctgcagtgcaggggctgggttagcctaagagctgactacttggtattcacagcaagcagctcaaacaaagagagaggagagggacgaattccatggggagctgaaggccaaaggcccgaagctgaaggcagaagtggtggattaccctgggggcgggaggcttccagctgcagaaatcgcccagattctaggaatccatcccacccgtgcccctgctcactgctgtcttacctgaattgcctgcccgcaacccttcggctcaccagcctcgggaacagtgactcactccaatgcctctggtcccagctacagcccaggcctccaccagcctgatgtcagaacctctgtagggtggccaggtctagcaaatacaaatacaggatgcccagttcagtttgaatttcagataaacaaggaatcttttttttagtataagtacatcctgtatcagtctggcacctctacctctctggtcccatcaaactctccccagcaatgtcctttcacagttacctttctgctgctcagagtcttgagcctccttggaagataaactggccccctgtgacctctgggtaagggagaaaccaacgccagccgaatagggtggggtaaggacctccccgccaccaccaaaaaaaaaaaaaaaaatgcaggcacagtggctgaagcctgtaatcccagtgctttgggaggctgacttgggaggatccttgaggctaggagtttgagaccagcctgagcaacacagcacgatctcttctctacaaaaaattttaaaaattaactgggcttggtggtgcacacctgtagtcccacctactcaggaggcagaggcaagaggattacttgagcccaggagttcaaggctgcagtaagctatgatcatggcactgcactccagcctgggtgacagagcaaaaccgcatctgagaaaaaaaggaaaaataaatgacctacccagttcttagcacagaatacattctccataaaaagcaacttcatacagccatcctttactctacggtcacctaggggcctctcacaagtccttgtgagatacatggcatggatggttgaacccttttcacagaggagaaaactgggggcctgctaattggtggaagggccaagaagaaaagtcctgctctttaggattctgctgctaaagctctgctggagtctgtcagatgtgaatatgcaggaaactataagccacatgagagcaggttaactgtggcttcaccgatggactcctggatcccagcacagtgctccagcccttagcagctgctccggaaataactgcagagcagctgagcgtgatgcctcacgcctgtaatcccagcactttgggaggccgagaggggcggatcacttgaggtcaggagttcgagaccagcctggccttcatggcaaaacctcatcgccactaaaaacacaaaagttagttaagtgtggtggtgggtgcctgtaatcccagctactcaggaggctgaggcagaagaatcgcttgaacccgggaggtggaggttgcagtgagccgagatcacaccactgcaccctaacctgggtgacagagtgaaactctgcctcaaaaaaagaaagaaataattgcagagcgaatacaaatccaccagagtctccacgacgacctgataatagagcacacacttgtggtcaggccccttctctcaatctctctctctctctctctctctctctctctctctctctctctgtctctcccctgcacccctctgccctgccccatgttctgggtcttgagcccaggtctgtctttctgtgctgtctccgtagccccaactacatggctacgtggtggggagaaggagaggatgaagcttaaggcagatttctggcttttctccccaaatgaagcaaaataacaaatgtagcttcaaaaggaaagcagcatgatcatggaaatgtcaaaacagccacgttcttttctagccaggcagaagagactttatagaacctgactcaacacagttgcattcagcattccttaaacacctaacataagctcccctttactggcaaattgccctgaaacaattaggaggtaaaggaattcccagaagaaaaggattttctagggcctttgaagagatgtgttgactctaacccaaacaaccctctgagaacatggagccacttggttagctctctttgagagttgtccaacaggtaaagcaggggcatccaccagtatctgtttttaattgcttctgtctttacccaaggtcagaaatgaacattgggatttgactgaggagttactttccatttcttacttatgttttctttattcagttatagggacagggtggccatggggatggtgagggaagtttggactttgagaccattttgatcagggcctttactctttataaatgggaagtgacttgcaggcattaataggctcatcaggttctcacctttggtgcatctcccccatggtcagtgccagcctagtcatggatctcgacctgatcagtggacttttctccataaactttccctaacacctggagagatacttcagctgcaatgtcacctcctcagagaggccttccttgattgcattatctagaggagattcccacccagccctgcccagcagtcaccctctatgaggtcacctgttgtattgtcctatgaggactcctatcaactatcacacgctgttgcttttttattattattattattattattattattattattattattattatttgaggcagagtttcactcttgtttcccaggctgcagtgcgatggcacaatctcagctcactgcaacctctgcctcctgggttcaagcgattctcctgcctcagccacccgagtagctgggattacaggcatgcaccaccacacctggctaattttgtatttttaatagagacagggtttctccgtgttggtcaggctggtctcaaactcccagcctcaggtgatccacccgcctcggcttcccaaagtgctaggattacaggcttaagccaccacacctggcctattattattattattattttaaatttatttattttgagactgagtttcactctatcacccaggctggagtgcagtggtgcaatctcggctccctgcaacctccatctcccaggttcaactaattctcctgcctcagcctctgagtagctgggactacaggcacgtgccaccatgtctggctaatttttgtattttttgtagagacggggttttgccatgttggccagtctggtcttgaactcctgacttcaggtgttccaccggcctcggactcccaaagtgctgggactacaggcatgagccaccgtgcccagtcttatttttttgagacggaatatcactttgtcacccacactggtgtgcagtggcacgatgtcagctcgctgcaacctccacctccctggattcaagaggttctcctgcctgagcctcctgaatagctgggattacagacctgtggcactgcacctggctaatttttgtatttttagtagagacagggtttccccacgatagcccaggctggtctcgaactcctggcctctagtgatctgcccgcctcagcctctcagagtgctgggattacaggcacaagccaccacacctggcctgttgctttatttttgacttgttggtctcttggtctctgcaaccaagatgacagatgtcatccgactgtcagcagcatgacgacagggccttgtctggcttcttcactgtggattcccagcctcaagaaggcaaccaggcccatgtgtagccactgagtcagagcctttaacaaaaaggataaagaagaagaagaaggctgggcgcggtggctcacgcctgtaatcccagcactttgggaggccgaggtgggtggatcacgagatcaggagatcaagaccatcctggccaacatggtgaaaccctgtctctactaaaaatacaaaaattagccaggtgtggtggcgcacgcctgtagtcccagctactcgggaggctgaggcaggagaattgcttgaacccgggagaaggaggctgcagtgaaccaagatcactccactgcactccagcctggcgacagagcgagactctgtctcaaaaaaaaaaaaagaaaaagaagaagaagaagaagaagaacaataataataatgacttacattaagtgtttgctaattgaatccttacagcactgtgacatagtaggtacattgattttgccactttgcacttgctgttccctttgcccggaacactcttcccaggtgtttgcaggacttttctctccatgcaggtctctgctcaaatatcaccaactcagagaggactttcctaaccccctccctaaaggagtgccaagcatcactccctaatcccatatcctgtggttaaggatttcactgtgtcccttctaaaaagatatgttaaagtcttaacccccagtacccaaggatgtgacttgatgtagaaatgggattttttttttttttttgagacagagtctcgctctgttgcccaggctggagtgcagtgatacaatctcggctcactgcaacctccacctccctggttcaagcgattctcctgcctcagcctcccaagtagctgggactacaagcatgtgccaccacgcccagctaattttttgtatttttaatagagatggggtttcaccgtgttagccaggatggtcttgatctcctgacctcgtgatccacccacctcagcctcccaaagtgctgggattacaggcgtgagccaccacgtctggcctgaaataggatctttacagaagtaatcaagttaaaatggggtcattaaggtgggccctaatccaatatgactgatgtccttataaaatgaagaaatctgaggccaggtacggtggttcacacctgtaatcccaccactttgggaggccaaagcaggtggatcacctgaggatgacctctggccaacatggcaaaaccccatctctactaaaaatacaaaaattagccaggtgtggtggtacacgcctgtaatcccagctatttgggaggctgaggcacaagaatcacttgtacctgggaggcagaagttatagtgagccgagatcacaccactgcactccagcctgggcaacagagtgagacttcacctcaaaaaaaaaaaaaaaaaagaaataggatctttacagaggtaatcaagttaaaatggggccattagggtgggccctaatccaatatgactgaagttcctataaaaagaagaaatctgaggctgggtgtggtggcttacgcctgtaatcgcagcacttgggagactgaggcgggcggatcacttgagccctggagtctgagatcagcctggccaacatggtgaaaccctgtctctacaaaaaatacaaaaattagctgggtgtggtggcgcacagctctcaggagctgaagcaggaggatcacttaagcacaggagtcgaggctgcaatgagctgtgatggtgtcattgcattccagcctgggtgacagagtaagaccctgctgccaaaaaaaaaaaaaaagaagaagaagaaatctaggctaggcacagtggctcatgcctgtaatcccagcactttgagaggctgaggtaggaggatctctcaagcccagaagttcaagactagcctgggcaacatagcaggaccctgcctgtttgaaaaaatttttttaaattatcaggggttggtggtgtgtgcctctagtcccagttacctgggaggctgaggcaggtggaccacttgagccaagttgaggttgcagtccagccttggtgacagagtgagaccttgtctcaaaacaaaaaagaagaaatctggacccgtggccgggcattggtggctcatgcctgtaatcccagcactttgggagaccaaggcgggcagatcacctgaggctgagagtttgagaccagcctgaccaatatggcaaaactccatctctactaaaaatacaaaaattagccaggttgtggtggcacgtgcctgtaatcccagctacttgggaggctgaagtaggagaatcgcttgaacccaggagacggaggttgcactgagccgagattgcaccactgcactccagcctaggtaaaagagcaagaccctatctaaaataaacaaacaaacaaacaaacaaataaaaaagaaaggaaggaaggaaggaaagaaaaaaaaagaaaagaaatccggacacagagacagacacagacggaagatgatgtgaagacagaggattggagcaatgcatctacaagccaagacatgccagaaattgccagcaaccacctgaagctaataggaagaggtaaggaggactgtcccctacaggtttcagaggaagcatgtccctgcccacacctcgatttgagacttgtagcctccagaactgtgagacaatatatttctgtagttttaagccacccagttgtgctgctttgttttggcagtcctagcaaacggacacacttgctttatttttctttatttaaagctctgatagccacctgccactgcacacatttatttgcctgctgactccctgcacccaggatggactgcaggtctcttgaggctgaggtctcatgttcatatgttcatgcatctgttacaagggctggcatttactccttccttcaggaactattcatttgagtgcctactatgccaggccctgccttcttttttttttttttttttttttgagacaaagtctcactttgtcacccaagctggagtgcagtggtgcaattctcatgcctcagcctcctgagtagctgggactacaggcatgtgccaccacacctggctaattttttgtattttagtggagacgggatttcaccatgttgcccaggctgatctcaaactcctgacctcaggcaatccacccgcctcggcctcccaaagtgctgggattacagacagagtgagccaccgcgccctgccaagccttggctttttgaagtttacattctagtaagaagaaacaggtaataaacaataaacagataataaaaaacaacaataagtaaataataaacaataaataggaacaataaaataggtagtgtgttaaatggtgatgagtgctatggaaaaaaatatagcagcaagggagatggtggggggttggggtgggcaacggtggtcatcagtgtagacagaggcctcaccaaggagctgacagctgagcctgaataagatcaaggaggaggcgtgggggattttgggggacagcagtacaggttgaacaggggttcccagcaagagcgattttgccctccaggggacatttgtctggaaatattagggagttgctcctggcacctagtgggtagaggccagggattctgctaaccatcctgcaatgcatggaacagccccataacaaagaatggcccagctggctgggcacggtggctcacgcctgtaatcccagcactttgggaggctgaggctggtggatcacgaggtcaggagttcgagaccagcctggccaacatggtgaaaccctgtctctactaaaaatacacaaattagccaggaatggtggcatgtgcctgtaatctcagctactcaggaggctgaggcaggagaattgcttgaacccaggaggtggaggttgcagtgagccaagattgtgccactggactccagcctgggcaacagagcaagactctgtctcaaaaaaaaaaaaaaaaagaagaaaaagaagaacggcccagccacaaatgtccgcagcagtgaggttgagaatccttaagggagagggaagaggaagccctcagcctcggagtgccctgcagggaccaggtgttggaggaatagccaaggcgatcactgctcagatgttttactctctgggaggacaccgtggtggggaaggttagagggtactgaggaaacagaaatatgtcgcaggccattttaagaagttcagtttttactctaaataagaccagaaatcactggagactttctgcagataagagacacaggctgacaagttccacaaacatcactctggtcatggggttgcaaatcgactgaagggggccatggcagatgtagggagactagtggggatggttggaatgttccaggcctgcgatgctggtggctcagagcagggtgaaggaggacagcaagtcaggattctggacctacttgggaaatctagttgtcagggtttgtggagtatgggagggaggaagaggaggcatggatgacttcaagatctttgttgttgttgtgtttgtttgtttgtttgtttttgagacagggtctcgctctgttgcccaggctggagtgcagtggcgcgatcacagctcactgcaacctccgcctcccggtttccagcaattccactgcctcagcctccggagtagctgagattacaggtgcacgccaccacgcctggctaatttttgtatttttaatggagatgggatttcaccatgttgaccaggctggtctcaaactcctgacctcaagtgatccacctgcctcccaaagtgttgggattacagacatgagccaccgcaaccgtgatttgttttgtttccaggctggagtgcagttggcgccatcatggttcactgcagcctctacctgagctcacgtgatcctcccatctcagtctcctgagtagctaggaccacaagcccacaccgctatgcccagctaatattttgaattttttgtagagacagggtcttgctctgtttcctaggctggtctcaagctcctgggctcaagtgatccgcccccaccttagccttccaaagtgcttagacttcaatatcttctgacctgagctgctggggggctggagttggtgcgggctgagatggggacagtagtgggaggaacaggctgggggaggatgaatgtgggggtgagctattagtcatccaagtggagatgtcacggaggcagtcggatgatggagtgcaggggaagtttgggctggaagtataaatgtgggaggcatcagcatctagacggaatttaaagccatgacgcatatgggctgagatcacctaggactgtgcgtgatgggaaagaatcgggtccaagggccagtccctgacactctccacagcttggacatttggctgtgagaatgaaccaacaaagatgacagccgggtgcggtggctcatgcctgtaatcccagtactttgggaggccgaggtgggcagatcacctgaggtcaggagttcaagaccagcctggccaacatggcaaaaccccatctctactaaaaaatacaaaaattagctgggtgtggttgcaggcacctgtaatcccagctactcgggaggctgaggcagggagaattgcttgaatccgggaggtggagtttgcagtcagctgagatctcaccactgcactccagcgtgggtgaaagagccagactttatttcaaaaaataaataaaagaaaaagaaaattgctccttcaagccacgtaacaggagcagagaaggaaaggtgggtcgaagcccagcttgggcattttccaggtgtgaccttggacaagttccggccttccccagttaccccatgacactgctgtcaaggatagaggagatcatgaaaagtgaagagcctctcagctttgtaaactgtgaagtgccttctaaggatcagggtgattgccaactgagcatttctataacaccaccactgaaataaaaactcaaggtcgcacagcttctgctgacatcattcagcagagaacagatgcagaatttccaacctttcaagagctgtgcaccctgttagcttgagggccaagaccttaccacttcctgaccaaaacataatgcatacagcatattaacctgaaaaaaattctaggaaatagaaaaacatgcatgtagtaaataattaaaatggcatagaaacgtatccatggggctgggcgtggtggctcacgcctgtaatcccagcactttgggaggctgaggcgggcggatcatgaggtcaggagttcgagacctgcctggctaacatggtgaaaccctgtctctactaaaaatacaaaaaattagccgggcatgatggcaggcacctgtaatcccagctaattgggaggctgaggcaggaggatcttttgaagctgggaggtggaagttgcagtgagctgagatcaagccattgcactccagcctgggctacagagcaagactccgtcttgaggaaaaaaaaaaaaattagccgggcgtggtggtgggcgcctgtaatcccagctacttgtgaggctgaggcaggagaatcacttgaacctgagaggcagaggttgctgtgagccgagatcgcaccactgcactccagcctgggcgacagagcgagactccgtctcaaaaaaaaaaaaaaagactttgctctggtcaggagtggtagctcatgctgtaatcccagcactttgggaggccaaggtgggaggaccaattgagtccaggagttcaaggctactagtgagctatgatcatgccactccactgcactccagcccaggcaacagaatgagaccctctctctaaaagaaaaaaaaaaaaaagccaggtgaggtggctcacgcctgtaatcccagcactttgggaggctgaggcgggtggatcacttgaggtcaggagttcaagaccagcctggccaacatggtgaaatcccgtctctactaaaaatataaaaattagccgggtgtggttgcctgcgcctgtaatcccagctactcaggaggctgaggcagaattgcttgaacctgggaggcggaggttgcagtgagctgagatcatgtcactgcactccagcctgggcgacagagcaagactccatctcaaaaaaaaaaaaaaaaaatttataaaagcacagggtcttccagaaattgtggattaattggtctggggagacgaccaagcatttgatttttgttgttttttttttttgtttctttgagttgtagtctcgctctgtcacccaggctggaatgcaatggtgcgatctgcgctcactgcaacctccgcctcaaaggttcaagcaattctcctccctcagcttcccaagtagctaggattataagcacctgccaccatgtccggctaattttattgcatttttagtagagacggggtttcaccatgttggccaggctggtcacaaactcccaacctcaagtgatccacccgcctcggcctcccaaaatgctgggattataggtgtgagccaccgcacccaggttgatatagtttttaaagagccccagctgattctaatgtgtagccacggttgagcgccactgttctagaaaactacaagtttaaactagaacaaaaagaggcattttggcccggcacagtggcaaacgcctgtaatcccagctacctgggaggttgaggcagaatcgcttgaacccgggaggaggaggttgcagtgagctgagatggcacaactgcactacagcctgggcaacagagtgagactccgtctcaaaaaaaaaaaaaaaagcagggggaggggaggcattttggcatgtccatcactaatgggatatacacgcacaccatatcctgggttgtagctttgcaggcagtaaatctaattttttaatttttttcaatttcagctccactcctaactaactatgatttagggctgtagggaagaaaaagtaccttttcctcacccatcacaaggttcatggctaacacccctaaagacagattaacaagagataagcatgacaaatttatttaacccaagttttgagtgactcaggagtcttccaaagtgaagaaccgtgacccagggcacctgtgtttttatggacagtcaagcagcagtgtcacaggaggacaaaagggtttgatccaatgatgtacacagtgggaacttagcaaggcctgtgagtttagtcttcatggtctccacggacaggaccggaccccctctggaatgaggggcttggggcctactttcaggagaggcaggtcagagaaaccttgagtggcccactgcagaagaggaaggcaggagaaggtcagagagtgaccttcctgcttctatggtttcctcaaattccttcagcttcaaatgctcagtttgccaaagtgctgtaatttggggtattgtgttccaaacccctacaggagaagtccctactgctctaagcagacttgagcaggcatcagaagcacgtgggcagcttgctaaacactgattgagggactcacccccaccaagtttctcagttgaaagatttgagaatctgcatttcttgaaattctcaggccttttgattaagaaactcttttttttttttttttttttttttgacagagtttcactcttattgcctaggctggagtgcaatggcatgatctcggctcactgcaactttagcctccctggttcaagcgattctcctgcctcagcctcctaagtagctgagattacaggggcccgccaccacgcccagctaatttttgtattacaggtgccaccacgcccagctaatttttgtatttttagtagagacgggggtttcaccacattagccaggttagtcttgaactcctaacctcaggtgatccatccgcctcggcctcccaaagtgctgggattacaggcgtgagccatcacacccggcagattaataaattcaatcaaggactttgggggaagtggggctgagaatttgcatttctatcaaacgccatcagaatttagcaggtgctgctgctgatccagggaacaggctttgagaaccagggctcagttgattactagtataattaacaacctctgatcccatcactggctcccatttcagagcaatggttggtgcctgcaagctttcatctcactgtgtccacacacaatcccatggggtcccagtgttcttatggatgaggttaccacggctgcaacattcacagtgaattgtccagggtcacgcagctgcagccaaagtctggggtggaacacaggtctaattacaagcaggagagaacctgggcaacactttctttgggagcatcaaagcaagctctcccaccacctgcttgagcacttccaaatcctgccgacatacccaaccctgcaacaggcaaagagcctcgcctcctgctgggagagcagcttcttgcggcgcggccttcgcgaaactccgtggagaaatggcgccccctggtggctccagagagagcagcgttccattctccgggctgggagctctggtctcatgcgtcatggacattcttggaccccatcactaacatggaaaatattattcagtccattccatcctaggaaagaactcagggtgctgaaaggaggtggggacttcagagctcaggaatgtaaaggaagggcggcggaccgagccctggggctctcagggggctggaatggttaaagcacagctgagaacaattcggagtttcacctttgaccttcccaaagacttctgctgaggaattttctttctttttttttttttttctttcagacggtgtttcacttttgtcgccaaggctggagtgcaatgtcgtgatctcggctcactgtaacctctgcctcccgggttcaagtgattctcctgcctcagcctcctgagttgctgggattacaggcgtgcaccagctaatttttgtatttttagtggagacggggtttcgccacgtttggccaggctggtctcaaactcctgacctcaggtgatccacccaccttggtctcctaaagtgctgggatcacaggtatgagccagcgcgcccggcggaggaattttcagtactaaagctatagtgttgtgatgagagtccggcgtgctccctgaatgccggtgcccgattcataacctagtgcattcgttcacacattattcattcaacagataagcttttgcgtgcagtactattctgggtgctgggaccaccgaaatcagcagaacagacagaatctttgccttcacggatgcctcctgccctagaacagtgaatgaatgaatacatcaataggtagaacacatggaaaatagatgacacttaataaagagatgtcattgagatgacacttaagcaaaacccggagtgaggagaaagagcaggtatctggtgaagaagtgttccaggcagagagaatggtaagagcaaagcccccggggcgtgggtgtgtttctctaacatgtttgagttcttttttttttttttttgagacggagtctcccgctctgttgccctggctggagtgcagtggcgccatcttggctcactgcaagctccgcctcctgggttcacgccattctcctgcctcagcctcccgagtagctggtattacaggtgcccgccaccacgcccggctagttttttgtatttttagtagagacggggtttcaccatgttagccaggatggtttcgatctcctgaccttgtgatccgcctgccttggccccccaaagtgctgggattacaggcgtgagccactgcgcccggcctttttttttttttaaattaaaaaaataagggccaggcacagtgactcacgcctgtaatcccagcactttgggaagcctagtggggtgtattacctgaggtcaggagtttgagaccagcctggccaacgtggtgaaaccccatctctactaatttgctgggcatggtggcacgcgcctgtagtcccagctccttggggggctgaggcaggagaattgcttgaacctgagaggctgaggttccagcaagccgagattgtgccattgcactccagcctgggcgacaagaatgaaactgtctcaaagaaagaaaaaaaataaaaataaatatggtgctgggcgtggtggctcatgctgtaatcccaccactttgggaggtagaggtcaggagttggagaccagcctggccaacatggtgaaaccccctctctactaaaaatacaaaaattagctgggcatggtggcctgtaatcccagctacttgggaggctgaggcatgagaatcacttgaacccaggaagcgaaggtcgcagtgagccaagatcataccactgcaccccagcctgggtgacagagcaagactccgtccccctcacccccaaaaaagagagagatggggtctctctatgttgcccaggctggtgtcgacctcctgggctcaagggatcctcctatcttggcctcccaaagtgctaagattacaggcatgaaccactgcgcccagcttgagttgttaaaaaaattttttttgtagagatggggtcttgctatgttgcctgggctggtcttgtactccagacctcagccagtcctcccacctcagtctcccaaagtgctaggattacaagtgtgagccaccacgcctggcctagactagactgttgatgatggagtgggatgtatctcttcatatccaagaaccacttaccctgttattaattcgacagtttttattaaatcaacttattttgttttattttttgtttatagagacagggtcttgctatgttgcccaggctggtcttgaactccccagctcaagcaatcctcctgtctgggcctcccaaagtgctaggattacaggtgtgagcccccatgtctggcctgaaataaacgcagtgtttttttttttttgagacagtcttgctctgtcgcccaggctggagtgcagaagtgtggtcttggctgactgaaaccaggcaaaatctgggccgggtgtgctggctcatgcctgtaatcccagcactttgggaggccaaggcagggggatctcctgaggtcagaagttcaagaccagcttggccaacatggtgaaaccctgtctctactaaaaatacaaaaattagtcaggtgtggtggtgcacgcctgcaatcccagagctactgaggaggctgagacaggaaaatcggttgaacctgggaggcagaggttgcagtgaaccgagaccgcaccattgcactccagcctgggcaacaagagcgaaactcagtctcaaaaaaaaaaatctaaataggccaggcacggtggctcatgcctgaaatcccagcactttgggatgccgagacaggaaggtcacttgagcccaggaattcaagaccagcctaggaaacagagtgagaccctccatctctactaaaaattaaaaaaattagcccagtgtggtaacacatgcctgtagtcccagctactagggaggctgaggcgggaggatcgcttgagtctggaaggtggaggctgcagagagccgtgatagcaccactgcattctggcctaagagaaagagccagaccctcacacctaatcccagaactttgggaggccgaggtgagcaaatcacgaggtcaggagatcaagaccatcctggctaacacagtgaagccccgtctctactaaaaatacaaaaaattagccgggtgtggtggcaggtgcctgtagtctcagctactcgggaggctgaggcaagagaatggcgtgaacctgggaggcggagcttgcagtgaaccgagatcatgccactgcactccagcctgggtgacagagcgagactcaaaaaaaaaaaaaaaaaaaaaaaaaaaaagccagacactgtctcaaaaaaaaagaaaagaaaagaaaagaaaaacctgaaatacttatttcagcctgatagagtccattgaggagagaacaggaacaggagagaaaggggagatggtagcgataaacatgccttcgagaaattttactaaacaaaggagcagagaaatgggaccctctgtggaatgacatccccagaggtgtctagctagataagacagtaagatttgccgggcacggtggctcacgcctgtaatcccagcactttgggaggctgaggcgggcggataacttgaggtcaggagttcgagaccagcctggccaacatggtgaaaccccatctctattgaaaatacaaaaattagtggggcatggtgggcaggcccctgtaatcccaggcaggagaattgcttgaacctgagaggtggaggttgtagtgagccaagatcgcaccactgcactctagcctgggtgacagggcaagactccgtctcgaaaaaaaaaaaaaaaagatttaagtgcatgttgacaccttgtatcgtcccaggatttggggcctgggtcttgccttgtttctagataatctggttcagtgccaagattttaaatagcatctccatgctgatgacttccctattcatatctcctgtctcctgcacacatccaaatctacagactggctggcgttctcagccatcaattgtccagaacagaactcttgactggctcttgtcccaccctctgccccttccatacggcttcataaggatgagagtaaggagtggtccttgttctctttttcctctcacttggcttccaggccattagcaagcattgagggctcccaccctcacccccatctctactgctcccatcttttagtctctctgtctccacccgtggcccatgaatcacttttccactcagcagtcaggcagatctgaaaaagtaaatcaagtcacgccagtcttctacttaaaattcaacatttttatccaggacaaccagaataaaaaccaaattggccaggtgcagtggctcacgcctgtggtcccagcactttgggaggccgagatgggcggatcacgaggtcaggagatcgagaccatcctggttaacacggtgaaaccccatctctactaaaaatacaaaaaaattaaccgggcatggtggcgggtgcctgtagtcacagctactcgggaggctgaggcaggagaatgacgtgaacccgggaggcagagcttgcagtgagctgagatcacgccactgcactccagcctgggcgacagagcaagactctgtctcaaaaaaaaaaaaaaaaaaagaataaaaaccaaattttttttttgaaatagggtcttgctctgtcactcaggctgaagtgcagtggtgtgatcacagctcactgcagcctggatcctcctgcatcagcctcccaagtagctgggaccacaggtgtcccccaccacgcctgagtttctttttttttttttttgagatggagtgtcttgcttgtcacccaggctggagtgcaatgccaacatctcagctcactgcaacctccacctcccgggtttaagcaattctcctgcctcagcctcccaagtagctgggattacaggtgcatgctaccatgtctggctaatttttatatttttagtagggacagggtttcaccatgttggccaggctagtctcgaacttctgaccccaggtgatccacccacctcggcctcccaaagtgctgggattacaggcatgagccactgcacctggcctaattttttaatttaaaaaaaattattattattattattattttttgagacggagtctcgctctgtcacccagctggagtgcagtggcatgatctcagctcactgcaacctctgcttcctgggttcaagcaattctctgcctcagcctccagagtagtcaggattacaggtgtctgccaccatgcctggctaatttttgtatttttagtagagacggggtttcaccatgttgaccaggctggtcttgaactcccaacctcatgatctatctgccttggcctcccaaagtgctgggattacaggtgtgagccactgcgcctggccaattttttaatttttatatttgtttgtagagatgggggtctccctgtgttgcccaggctggtcctgaactcctgagctcaagcaatcctctggcctcagcctcccaaagagttgggattacaggtatgagtcactgtgcctggccccagactctcttcagtggcctccaagttcctccatgatcttttcctggcctctgatttcatctcatacattctctgccttcttcatcattttgttctccaagagtctatcccctgccacgcccacaccacccccaccactggcacctcttgaatttctcaaactaagattcctttccaatggcatattgcgtgggattctctcttccagtatctgcacatggccagtttcttttcatccatctcaacttaaacatcacaggtagatgcttttgtgcaaacacaacctccctgtccactctgccccacatccacatgtggccttgtcatgtggccacgcctagctgcaaagaaagctgggaaatgtaatacttaattgggcagctctgtgcttccttttagtcacatcccccaagggcagcactatcttgattactcaccgtgacatgcgatttacatttacacaaatagcctccggtttttttttttttttttttttttttttttgagacggagtctcgctctgtcgcccaggccggactgcggactgcagtggcgcaatctcggctcactgcaagctccgcttcccgggttcacgccattctcctgcctcagcctcccgagtagctgggactacaggcacccgccaccgcgcccggctaattttttgtatttttagtagagacggggtttcaccttgttagccaggatggtctcgatctcctgacctcatgatccacccgcctcggcctcccaaagtgctgggattacaggcgtgagccaccgcgcccggccgcctcctgttttttttttgagacgagtctcgctctgttgcccaggctggagtgcagtggcgcgatcttggctcactgcaagctccgcctctcaggttcaagccattctcctgcctcagcctcccgagtagatgggactacaggcgcccaccaccacgcccggctaatttctttttttcatttttagtagagatggggtttctccatgttagccaggatggtctcgatctccagacctcatgatccacccgcctcggcctcccaaagtgctgggattacaggcgtgagccaccacgcccagccagcctcctgttatttatacttactcttcactctgttttgaatatctcttttactccaatgctgatgagttcctgtcacctggattccaggacttgcctcagatcctagccttccagaagcctagtttcagccttttttttttttgagacggagtctcactctgtcgcccaggctggaatgcaatggtgtgatctcggctcattgcaacctctgcctcccaggtttaagcaatcctcctgcctcagcctccctagtagctgggattacaggcgtgcaccaccacgcccagctaatttttgtatttttagtagagacagcgtttcgccatattggccaggctggtctcaaactcctgacctcaggtgatccgcccatcttggcttcccaaagtgctgggattacagggatgagccaccacacaaggcctccagcctttcttttgagtcaataagctacaccatattctaccaatatttttacttgagtcagcagtggtttcctacacctgcaactcaagaactctaagggttactgcctccattgtttgttaaggcaccacaagactttgctgaactgtacataatgctttaggtcaataaaataatcatcatcataatgacaactgaggagaaagtcatgataatatcaacctattgagcactatggtttttttgttttattttgttgagacagggtctctgtcacctagattggaatacagtggtgtgatattagctcactacaacctctggctcttgagctcaagccatcctcctgcctcagcctcccgagtagctgggactataggcacgtgccaccatgccccgctaatttttttttttttttaagtagagacgaggtcttgctatgttgcccaggctggtgtcgaactcctgggctcaagctgggctcaagctatcctcctgtctcagcctcccagtgagcactatattagttagcacatagattctgtacaaagatcaagagagaacagtctactttatttcccatttagtagtccatctataaggggttgagagctatttgggtggcttcctgttctctggctgggccccaggctcctcctatcttgttgctcagtgtcctcaacacatggcttccaccttagggaccaagagagtcactccagctcctgcaggaaagaaaggaagagagagggagggcactctcttttccatttatggtcttggtccaggaagttgcctgcattacttctgttcccatcccattggccagaaccttgtcatgtggccacgcctagttgcaaagaaagctgggaaatgtattatttaattgggcagctctgtgcttccttttagtcacatcccccaagggcaacgctatcttgattactcaccatgacatgcgttttacatttacacaaatagcctcctgttacagagttctttggtttttgttttcactctgttttgaagatctcaacacgggtctctgtaaatatctagtccatttcttcggcttccccatcttctgtgcattcaccacattttaccaaagtactctcctagcaatggcccccatatggccgcctccacacacatcactgcctcttctccccaggaaggagatgccggggcataggctatgtgggtgcaaaacactgccaggttgctctcccacatagcagctgccagcccacactcctgccaggtgcatgtgggggttctatagtcccataaaaggtattttattcatttttgtcatgtctatagttggacatctgttgttttttgcatggccagcatccattcttctttttttggtcactgtgccctagcattcttttgggaaactaccttttccgtcattctcaatccacgtgattcagatgggactgaatctcttacttactggtgtgaccaggtgatgacacactggccaacaaccatctagcacctcccaatcaatccagtgaaggcatgtgactcaaactgaatcaaattagagccaggtcaggactctcactggaactgttgggaaaagggctttccctttctctgtgggtggttaagctagagtgggtagaggccaagactgctatgatctcagggtagaagctacctgagggtgaagcaggcctccacagaagaaagtatagctgagagatgaagagtgagggtaattctcatactgtgagaaccaaccatgcctgaaggcgacttgcactagagcttttataagttacataagtttcatagagttacataagccaataaattccttatttatttattgagacagagtctcattctgtcgtttacactggagtgcagtggtacaatctcagctcactgcaacttctgcctcccaggttcaagtgattctcctacctcagcctcccaagtagctgggattacaggtgtgtaccaccatgtccagataatttttttattttcagtagagacggggtttcgccacgttggccaggctggtctcacactcctggcctcaagtgatccacctgcctcggcctcccaaagtgctggatcacaggcgtgagccaccatacccagccaaattcttttttacacaagccaatttgagttgggcttaggtcactcaaaagaagtcagactaaccccacccatcctggtgctaggcatacagtaggtcataggacaaatgtttgttttttctttttttggtaaagaaaggcagacttattagagaaagtatgaagatacactgcatgaaagcaaagggcagcacagcagagaaggggctgtctgcaaatgtttgttgaatgaatgaatgagcccatgtgtgggaataaatgagacatgacagacagctacccagtgatgtgtaaatatccacagtgagttatccaggagttcaggtgaggagcacaggcttacttattttgctaaatatgaattctaaggctaaacaagacacatgtgagctcattcactcattgcactccagttttgttccttttgctttcagataatcagatcacgacaggcgccggccatcacacctggcttattcttgtatttttagtagagataaggtttcatcatgttggccaggctggtctcgaactcctgaccttaggtgatctgcctgcctcggcctccctaaagtgttaggattacaggtgtgagccaccacgcctggctctaaaagggtatcttttttttttgaggtggagttttgctgttgtcacccaggctggagtgcaatggcatgatttcagctcactgcaacttccacctgccaggttcaagtgattctcctgcctcagcctctcgagtagctggaactacaggcacacgccaccacgcctggctaatttttgtgtttttagtagagacaaggtttcaatgtgttggccaggctgatcttgaactcctgacttcaagtaacctggctgtctcggcctcccaaagtgctgggattacagacgtgaaccactgcacccagccaagagggtatcttaagaccccactacattccccctagaggaatagagactagataggcaccacaggaccctctattctgcaattttctaggtatgttttattttgagctgatttttatgaaaagtgagtactgagaaatcctgagtgtggatattaatcccatacatcttacaatgatttaaattaaaattaaatttgaatttttttggtcttttacttgagtatttgtaaaaagtaataaatgtatttcattttaaaattaccagtgttcagtccaggtgcagtggctcacacctgtaatcccagcactttgggtggccgaggcaggaggatcacttgaggtcaggagttcgagaccagcctgaccaacatggcaaaaccccatctctactaaaaatacaaaaattagccgggtgtggtggcacacacctagttcctgctcctcgggaggctaagtcatgagaattgcttgaacccaggaggtggagattgcagtgagccgagatcataccactgcactccagcctaggcaacacagtaagactctatctcaaaataaataaataaataaataaatgtaaataaaattaccagagttcaagcacaacacaggacatgtgtgacaggcctgtgtcctttgcatctcttacctgtgatttgctttttttttgagatggagttttgctcttgtcacttaggctggagtgcaatggcgagatcttggctcactgcaacctctgcctcctgggttcaagtgattctcctgcctcagcgtcctgagtagctgggattacaggcacctgccatcacgcccagctaatttttttatttttagtagaggcggggtttcaccatgttggccaggctggtcttgaactcctgacctcaggtgatccgcctgcctcggcctcccaaagttctgggattacaggtgtgagccactgtgcctggcctctgtgatttgcttttgtattgagatacagtctcattttgtcacccaggctggagtttgtggcatgatcatggctcactgcagcctcaacctcccaggctcaagcaatccttcaacctcagcctcccaagtaggtgggactacaggtgcctgccactacacctggctaattcttgtattttttgtagaggcaaggtttcaccatgttgcccaggctgctgtgattagtttttgtttttgagatggagttttcctcttgttgcccaggctggagtgcaatggcacgatctcggcttaccgcaatctctgtctcccgggttcaagtgattctcctgcctaagcctcccgagtagctgggattacaggcatgtgccaccacacctggctaattttgtatttttagtagagacggggtttctccatgttggtcaggctggtctcaaactcccgacctcaggtgatccgcccgcctcagcctcccaaagtgctgggattacaggtgtgagccaccacacccggactgatttgtttggttggttggtttttttggagatggagtctcactctgtcgcccaggctggggtgaaatggcgcaatctcggctcactgcaacctccacctgccgggttcaagcaattctcctgtctcagcctccctgtagctgggattacaggcgtgcaccaccacacccggctaattttttgtctttttagtagagacgaggcttcaccatgttggtcaggctggtcttgaactcctgatctcagatgatctacccgccttggcctcccaaagtgctgggattacaggtgtgagccaccgcgcctgtagatttgttttttatctatttttcaactttgaatttccaattcattaaaaaagaaatcctgggggtgccaactctctaggagcttaataatatttcacttcgggcctggcgaggtggctcacacatggaatcgcagcacttgggaggctgaggcaagaggatcccttgagcccaggagctcgagactagcctgggcaacatagcaaaacgctgtctctacaaaatatgaaaaattagcagggtgtgatggcacgcacctgtactcccagttactcgggaggctgaggtgggaggatcacttgagcctgggaagtggaggcttcggtgagctgtgatctcaccactgccctcagcctgagtggcagagggagatcctgtttcaaaaaaaaaaacaagatttcacttgaggaacggacttttgaattcccaagctaaaagaaatcataagtataattataattatggcatattagtgttgcacctaagtagcataagaaatgaatcaggaactttttgggctttgggctttaaatagcagaaaccatgatttagaatggcttacatggccaggcacagtggctcatgcctgtaatcccagcactttgggaagccgaggcaggagaactgcttgagcccaggagtttgagaagagcctgggcaacatggcaagaccacactctacaaaaaataaattagctgggtgtggtggtgcatgcctgtggtctcagctaatcgagaggctgagtgggaaggatcactggagcccaggaggtcaaggctacagtgagccacgttcacaccactgcattccagcccaacacagggcatgtatgacaggccagcaacctttgcatctctgacctgtgattcacttttgtctcataaaaacaaaaacaaaacaaaacaaacaaacaaacaaaacagaagaaaggaaaaaaagagtggcttacattttttttccccaaaaatctggaggtaagtatctgctgtcgctggcggaacaataccagtgctggctattctgtgatcatcttggcttttcttcttggtaaacaagatggctgctgcagctccaggtatcatgtgagtattcaaagcaggaagaggcaggaaaagggctggagccagttgtgtctctcccttttatctggaaagcaaacatttcttggaaatccaacagcagagttggcaactgcagttgcaaaggaacctgggagaacaaatgtgaagctttccagcttctaaaataggaagaagaatggctgggcatggtggctcacgcctgtaatcccagcactttgggagaccaagacgggtggatcacctgagatcaggagtttgagaccagcctggccaacatggtgaaaccccgtctctactgaaaatacaaaattagccaggcgcggtggcctgtatcccaggtgcatgcctgtaatccctgctactcgggaagctgagacaggagaatcgcttgaatctgggaggtggaggttgcagtgagccgagatcatgccattgcactccagcctgggcaacaacaacgaaagttcgtctcaaaaaataaataaaaaaaaataggaagaagaaaagagtcacaggttagggatggtagttggcgtagctagtaggctgtatctgtcacaagaaagatcacagaagccacagtgttctagaatattgaaatctcttgtcctcctttcagttcttgtccctgaatgacagacaccgccagaactcacttcaggtctatatgcatccaggggcgacttaatagtaattcactatgtgagttattaacggttattaaaatgcagcatttgtgaactaaaattagccaatttatccatgcctgtattctgccaagtccttctggctgccactcaatgcttaatgaccttgcctttgcacaaacagctgaagtgggtatggggtttccttttgaggtgatagaaatgttttagaactagatagaggcggtggttacacagcattgtgaatgtggtaaataccactttggttaattttcccttatgtgaacttcaccttaatttaaatgaaggagaagggaaaggaagagggagagggggaggagacacagaaggcagaggaagggaaggagagaaagaaaaacaaagaaccttaacagttatttctggtggccataaggaaaaaaactctaatacttttttttttttcagacctgagttttgctcttgttgcccaagctggaatgcaatggcgccatctcggctcattgcaacctctgcctgctgggttcaagcaattctcctgcctcagtctcccgagtagctgggattacaggtgcccaccaccatgcccagctaattttttgtatttttagtagagatgaggtttcactacattggccaggctggtctcaaactcctgagctcaggtgatccacccaccttagcctcccaaagtgctgggattacaggcgtgagccacctcgcctggctctacgtcattgtgctttttttttttttttttgagacattgtttctctcttgttgcctaggctggagtgcaatggtgccatctctgctcactgcaacctctgccttccaggttcaagtgattctcctgcctcagcctcccgagtagctgggattacaggcatgcgccaccgcacgtggctaattttttgtatttttagtagggaccaggcttcagcatgttggccaggctggtgtcaaactcctgaccttatgtgatccacccgcctcggcctcccaaagtgctggggttacaggcgtgagccaccgcgcccggcaaccctaatacattattgttacagcctttgggcaaggccttttaacatttccatgggataagttccactcttgggaactaatatgtaagaatatatgtgcaagaagatgtgtgcaatattgttcatcttggcaaaaatggcaaacaaagtaaatatccatccttacagagtttctgaatagatcacggtatagccacaccacagaatattgtacagccactaaaatgctctttgccaggtggcctggagggatgtcaatgtgatgtgttaaatgagaaaaggaggatacagaaaaatgagtataacatgatgctatttatataaactcctgtgtattcaatgtgtatgtagtatgtttgcatgtctatacttacatatacatgtacgtgtatccaaatatgtatgtatatgtgtatttgttttttttgttgttgttcgtttgtttttccagatatagtcttgctttgttgcccaggctggagtgcagtggcgcaatctcagctcactgcaacttcacctcctggttcaagcaattctcatgcctcagcctcctgagtagctgggattacaggagcccaccacacctggctaatttttgtatttttagtagagacggggtttcaccatgttggccagactgttctcaaactcctgacctcaagtgatccgcctgcctcggcttcccaaagtgctggggttaaaggtatgagcccccgagcctggctgtatatgtgtatttgtataaaattacctaggcatggagaaaaagatgggagcatacaaacccgaggtgagaacgggagagaaaaaggagaaatagggaaggagaagccaagagaaaaaagaaagagaaaaaccaaaaagatttctctagaagaaacttcctggccgggcatgttggctcacgcctgtaatcccagcactttgggaggccaagggcaggggtggattaccagaggtcaggagttcgagactagcctggctaacatggtgaaaccccgtctctactaaaaatgtaaaaattagctgggcgtggtggtgaggccctgtaatcccagctactcgggaggttgaagcaggagaatcacttgaaactgggaggtggaggttgcggtgagctgagattgtgccattgcactccagactgggcgacaagagcaaaactccatctcacaaaacaaaaaacaaaaaacaaaaactttctttcccccaacatatatgatatgatcacatttatgattttttgtaaaattatatgcgtgtgcatgtacatgtataaaaccgttaaatcatagatttaatgcattataatcaaacagaatttaacacagaattagacttactgttattatggcaccatcattattaattatgcctgcaatgcctcctttatgcagagagtaacaatgcatatttgcatgaacagtatttctggtgtataattttccaattatctggtattagaatatgcacgtattatgaatcaaatatgaattatttagactcttcccccgaaatatatccagagtcctggaagttaatttatgtggttgaataattaatataagtgattatagcaccccgcccccttaaagaaaagaccatttggtctttgcctgcccagcaactgaggcccttggaggagactctgcctttgcccaatagtttccctggatttttgtaatgggaagaatgaaacaggagccagacagagagggagctatggagtagatcagtagagcttttcctgctgagcagactcttgccaatcactttcgttcttctactccagatctggatctctcaacgcttgatgtgaacatgtgacccagacctagccaatcggagggcttcatccatctggccaatgtgattggtcagatctgggcacatgacccaaactgggccaatcagaggattcatttcctaccacttcctgctgaaactgtcagagacacgcctttcttgagactgctggcccctctcaccacactgagagtgaagcctcacagaagacgctgacagcatgaaggactagaagattctgaagacatctttgagcacctggctccaactgtgctaggatcttaggatctgggtatatttaaagtgcacaatgtcttttattttattttttttttgagacggagtctcaatctgtcgcccaggctggagtgtagtggcgcaatctcggctcactgcaagctccacctcccaggttcacgccattcccatgcctcagcctccccagtagctgggactacaggcgcttgccaccacgcccagctaatttttttgtatttttttagtagagacggggtttcaccatgttaacaaggatggtctccatctcctgacctcgtgatccgcccgccttggcttcccaaagtgctgggattacagggcgtgagccactgcacccggccttttttttttttttgagacagtctctctcgcccaggctggagtgcaatggtgcgatcttggctcactgaaacctccaccacctgggttcaagagattctcctgcctcagcctcccgagtagctgagattaaaggtgcgcaccaccatgtccggctaattttagtattttttgtagagaagagttttcgccattttgcccaggctggtcttgaactactggggtcaagtggtcttcctgcctctgcctcccaaagcgctaggactgcaggcatgagccaacacgactggctgtgttcatgagctaatattgtctcttctggtttctgtttgatttccagattaatggtatatccatcaagagtagtattcttggccgggggctgtggctcacacctgtaatcccaacattttgggaggcctaattgggagaatcacttgagcccaggagtttgagaccatcctgggcaacgtagagagaccgcatctccaccaaaaaaaaaaaaaaaaaaaaaaatgctgggcgtggtggctcacgcctgtaatcccagcactttgggaggctgaggtgggaggatcacttgaggtcaggagttcgattcgagaacggcctggccactatggtgaaaccccgtctctactaaaaatacaaaaattcgccgggtgtggtggcaggtgcctgtaatcccagctgctcgggaagctgaggcaggagaatcgcttgaacccgagaggtggagtttgcagtgagccgagatcgcggcattgcacttcagcttgggcgacagagccagactccgtctaaaaaaaaaaagaagccaggcgtggtggtgcgtgcttgtggttccagctactcagaacactgaggtgggaggattgcttgggcccaggaggtcgaggctgcagtgagctgtgattgcaccactgcactccaggctgggtgacagaataagaccttgtctcaaaaagaaaaaaaaaagcaagattcttgggttctgttctttctcatttgttctttctttcttttttttttttttttttgaggtggagtcttgctctgtctcccaggctggagtgcagtggtgcaatctcggctcactgcaagctccgcccgccgggttcacgccattcccctgcctcagcctcccgagtagctgggactacagcgcccgccaccacgcctggctgattttttgtatttttagtagagacggggtttcactgtgttagccaggatggtctcgatcccctgacctcgcgatccacccgcctcggcctcccaaagtgctgggattacaggtgtgagccactgcgcctggccttgttctttcattaaatttttcctcaacactatgtgccaagcctttctgaggctctgagggtacaaggatgaatcaaactgagtattatggcagagacagctgtttcagcactaatatctcttttttccccttctttctttaataacagaagttatgagttttaggtgggtgcatgtttatccagttgatgactacatttctctttttttgttttgagacggcgtctcactctgttgtccaggctggagtgcagtggcacaatcttggctcactgcaacttccacctcccgggtcagtgattctcctgcctcaggctcccgagtagctgggactacaggtgccggccactgcgcccggctaatttttgtatttttagtagagatggggtttcaccacgtgggccaggttggtctccagctcctgacctcaggtgatctgcccaccttgacctcccaaagtgccaggattacaggggtgagccaccatggccggcccccgatgactacatttccttttttttttcttttctttttttttttttttgagacagagtctaggtctgccacccaggctggagtgcagtggcgtgatcttggctcactgcaactcctgggttcaagcaattctcttgcctcagcctcctgagtagctgggattacaggcacccaacaacaccatgcctggatatttttgtatttttagtagagacaggttttcaccatgttggccaggctggtcttgaactcctgacctcaggtgatctgcctgcctcggcctcccaaagtgctgaggttacaggtgtgagctgctgtgcctggcctgatgactacatttctcagcctgctttggatctaagtgttgatgtgactgagttctggtcagtgagatataagcaacaatgataaatgttccttctaggtcatgctatttttttttgctctgacacactttatcatcacttaatgggtcatgctattaaaaggaatggatatgttctccctttgcccctttttctgccattttccactggccaggatgcaggtgtgatggcaggacctagagcaggtacctcgacccagagattgaagctgtgtgttgaagctggccattgcctccctgctaccctaggacctcctaacttgggttgttagtgagagagatatatacttgattttgtttaagccactaaacttaatgtctctttgttatagcagcctagattttacccaaactaataagcctttgacctccacttctagtgaaatagaccaaagagacagccaccccctgccccccgcaaaaaagtgacaagttctgaaatagatataaccccatggtgttgtgaggttataaattagggcatgcgtggctgggcgcagtggctcacgcctgtaaccccagcactttgggaggctgaggcaggcggatcacctgaggttgagagttcgagaccagcctgaccaacatggagaaaccctgtctctactgaaaatacaaaattagctgggcatggtgatgcatgcctgtaatgccagctactcggaaggctgaggcaggagaatcacttgaacctgggaggcaggggttgcggtgagccgagatcacgccactgtactccagcctgggcaacaaaagcgaaactccgtctcaaaaaaaaagttagggcatgctcaacttgggctgagacactgtttgatgaaaggcttactgaggaggatggctgaaaagaattcccataagcagaaattggagtagggctggacgtttgaatcaattaaaaatgttttgagctgtgagcagtggctcacacctgtaatcccagcactttgggaggctgagtcaggaggatcacttgagtccagcaggtcaaggctgcagtgagccatgatcaggccactgcactgcagccttagtgacacagcaagatacacacacacacacacacacacacacacacacacacacacacacacacacggtgttttggctataagtaacaagaataacaaaatacaacaaggaatatctttaaggagtcattcatttattctacaaacattttcctgtcacttactatattccaggtcctgttctaggtgctggggatatggcaatgaataaaacagatcaaccccctcaccactcctgaaaatccaagaaaaactctggctttatagattttatgatctgtggggagagatttattatcttacagaacaagaaatccagagataggtggtcctgggctggtggatagaggctcaacactatcttaaaggaccttattctttccatctcttcactctgccatcctcagtgtgtcggcttttttctcaaccttgtaacctcatagttgtaatatggctgccactgctccaggaggcacatcacatacacattaatccagtggagtagaagaagagaacctgtttcctcccatgctgctcttcttttttatttttctagcaggaaaacttcctcggaagtcttcagctaactttaaatcttatttactagaattgcatcacattcctaataaaatcactggcaagtcgaaggaaacaagcatgagtggcttaggtcagtgttctcaaatggttgtctcaggaccaggcacggtggctcatgcctgtaatcccagcactttgggaggccaaggtgggtggatcacctgaggtcgggagtttgagaccagcctggctaacatggtgaaaccctatctctgctaaaaatacaattagctgggcgtgttggcacgcacctgtaatcccagctactcgggcagctaaggcgggagaatcgcttgaacctgggaggcggaggttgcagtgagccgagatcatgccactgcactccagcctgggtgacaaagtgagactccgtctcaaaacaaaacaaaacaaaacaaaatgagacaaaaaagctgttgtcaggttattaatgactccaaagagctttggtttatgtggttatgtctattgatatttgctatattagaagttaaaagtgaaaaaaattaaacatgtatttattcattcaaaattatcctttacatagtaacataaataattttttatgaaaaatagctatactttgcaagacaaaaaatagtgcaaagcatggcattttttgtttgtttctttgtttgtttgttttagacaggttcttgctctgtttcccaggctagagtgcagtgatgcaatcatagctccctgcagcctcgacctcctgggctgaagcgaccctccttcctcagcatcctgagtaccaggaagcacaggcttgcagcaccacatccagctaattacttcataatttttatagagacaaggtccttctgtgttccccaggctggtcttgaactccgggactcaagcgatcctctggccttggcctccaagtggcaaagtggccctgttttgcattttgctattatctctttgatgtctgcttaacagaagaagctggattttcatgcctgcttctgcattcaacccattgtgatattctgttttgctttaaatacacagaaattctggtctcatacatgtatgttgttgcaaaaaagaaggctttgtggacctcttggaaaggtcttgaggattcagcattcacaactggagaaccactgacttatattgattaaaactcactctctgaggatcccttgagcccagaagtttgagacctgagcaacatattgagactccgtctctaaaatataaaaataggccaagtgtagtggttcatgcctgtaatcccagcactttgggaggccgaggcaggtggatcacttgagggcaggaattcgagaccagcctggccaacatggtgaaatcctgtctctactaaaaatagcaaaattagttgggcatggtggcgcacacctgtaattccaactacttgggtggctgagacaggagaattgcttgaacctggaggtggaggttcagtgagccaagattgtaccactgcactccagcctgggcgacagtgcgagactccatctcaaaaaaataaaataaataaaaatttaaaaaattacctggatgtggtggtggtgtgcacttgtagtcctagctgcttgggaggctgaggtgggaggatcatttgagcccaggaggtggaggctgtggtgagctatgatcgtgccactgcactccatcctgggagacacagcaagaccctgtctcaaaacaacaacaacaacaacagcactcactccctgggctataaagaggcttagcccccacccataattccacacagctcaacctccctataaacacatggctgcttccattccttaacaaaatcataattctctcagcaaggagaaaggcagggaggggtattggacaaaatcataattctctcagcaaggagaaaggcagggagggttattgggtgggcagcccacagagtctgccacggattgctctacagcggaggttttccagcctattcgaccgtgtcccacagtaacaaatacattttacatggtgactcagtacacacatgcacacaacagaaacatttttattaacaatacttaggcttgcaacatggaatgccctctgatattttctattctttgtattcttttctatttctttttttaaaaagtgctggctgtaacccaataaattcacttcatgattcactagtgggtcataatcttcagtgtgaaaaatactgttctctagggacttgttatttgattggatagaggggctagacagaggccttcaaaggagggaattcataaccattgcctcaaaagttggccaaggaattgccccaagatgcctgtgttgacccagcctttgtcctttttgcctgcattaactcttttatattgagcagagggcaagtaggctcaactcaaatggtgttaagtaaaaaggtaaggctgggcgcagtggctcacaccgcggcactttgggaggccgaggcaggcggatcacctgaggttagtctggccaacatggtgaaaccccatctctactaaaaatacaaaaattagccaggcatggtggtacgcgcctgtagttccagctactcgggaggctgaggcagggagaaacccttgaacccgggaggcggaggttgcagtgaacggagattgcaccactcacttcagcctgggtgacaaaaaaaagtctcaaaaaaaaaaaaaaagtaaaaagataaacagaattataattataacaaaatttattgactcatagaattggaaatcccaggagcctcgtgagcttcaggcacagccagaatgatggccacagggtaagtacttgttgatctccccctggagaccctcatgtcctccatgttggcttctcaggaggagaatctcaggcaatagtgccccctgtagctccccaacttcaaaaaccagagtatagaaaactacatcttactggcaggtctagaaaaatgtcgccaaacctggatcatgcatccacctttttttgtttgttggtttttgagacagtctcgctctgttgcccaggctggagtgcaatggcacgatctcagctcactgcaacctccacctcctgggttcaagcgattctcctgcctcaccctcctgaatagctgggattacaggtgtgcaccaccatgcctggctaatttttgtatttttagtagagacagggtttcactatgttggccaggctggtcttgaacccctgacctggtgattcacctgcctcggcctcccaaagtgctgggatcacaggcatgagccaccgcacctggcctatgcatccaccttttgaagggaatgttgaggtcagccttctctgaacacgtggggtgagagtggatgggcagtggctttccagtggagaggaggaagttgttgcttgaagcagggaggattttgagcaggcaaaaccagcagatgtttactacctcaagctccatgaggccagggaaggtgctgggtcctgagcaccactgtatgcccaatgactggcacaaattagactcagaaaatacttgtatgaacaagggcaattgtgttgtatgattgggtatccatggacaatttacatatttgaaaaggtaacagaaagatttgtagggcatgatggctcatgcctgtaatcccaggactttgtgaggctgaggtgggaggattgcttgagcccaggagttcaagaccggcttgggtagcacaacaagatgccatctctacaaaaaattagctgggtgtggtggcatgtacctgtggtcccagctacgtgaggggctgaggcaggaggattgcttgagcacaagaggtcaaggctgcagtgtgctataatcctaccactgcactccagcctgggcaacagagaaagaccacatctcaaaataaaaaaacaaaataaagaaggatagacaaataggttagtggaagagaatagaaagtccagctagctgggtgcggtggctcacgcctgtaatcctagcactttgggaggccgaggcgggcggatcacaaggtcaggagatcgagaccatcctggctaacaccgtgaaaccctgtctctactaaaaaaatacaaaaaattagccgggcgtggtgacgggcgcctgtagtcccatctacttgggaggctgaggcagaagaatggtgtgaacctgggaggtggagcttgcagtgagtggagatgcgccactgcactccagcctgggagacagatcaagactccgtctcaaaaaaaaaaaaaaaagaaagaaaaagaaagcccagctgagactgacacatatatggccaaattatcttcaacaaagtcaccagggtaattcattgaagaaaatcaattttgtatttcaacaaatattactgggacaggccaggtgcagtggctcatgcctataatcccagcactttgggaggctgaggcagaaggatcacttgaggccaggagtttgagcagcctgggcaacaaagggaaacctcgcctctgtctaaataaataaataaataaaattcactgttgagaaaaagaaaaggccactgaattgtatactttatttcattttatttatttatttttgagactgagtctcgctctgtcacccaggctagagtgcagtctcatgatctcagctcactgcaacctccgcctcccttcaagcgattctcctgcctcagcctactgagtagctggaattacagacatgcaccaccatgcccagctaatttttgttatttttagtagagatggggtttcaccatgttggtcaggctggtctcctgacctcgtgatctgcccaccttggcctcccaaagtgctgggattacaggtgtgagccactgtgcccggcctgaattgtatactttcaaatggtttggccgggtgctgtggctcaacgcctgtaatcccagcactttgggaggctgaggcaggtggatcatttgaggtcaggagtttgagaccagcctgactaacatggtgaaaccccatctctactaaaaatacaaaaaaaaaaaagaagataaagaaagaaagaaaaagaaagtagctgggtgtggtggcatagtcccagctacttggtggctgagatgggataatcacttgaacccgggaggtggaagctgcagtgagccgggattgtgccactgcactccagcctgggcaacaagagtgaaactccgtctccccaccaaaaaaaccccaaaaaacattatatcttcctggctaagtgattggcttatggtaactcagactgagccaacgaagccctcctcagtttgttcttggaactattgtcaggggtattttccctttccattggtgttgctgtgctggtgagaaataaccccagaaccagcaggtaggcaaagctacaggagaggaaagccaacttggagaagaaccgagagatgatagagaaatggaaaccagccatgttgagcccctgggttcaggttcacctgatgtcctccaaactttttgttcaggctagtttaggatgtgcctatatttcttgcaaatgagtctccaaatacaaaccccaaatcattgtagcaaaatgcactgaccaactgtgcttccacgatcagatcagtaagctgggtgcagtggctcatgcctgtaatcccagcactttgggaggccaaggtgggcggatcacttgaggtcaggagttggagaacagcctggccaacatggtgaaaccccatctctactaaaaatacaaaaattggccaggtgtagtggcaggcacctgtaatcccagctacttgagaggctgaggcagaagaatcacttgaacctcggaggcagaggttgcagtgagctgatatcatgccactgcacttcagcctgggcgacagagcaagactccgtcccaaaacaaacaaacaaacaaacaaacaaacaaacaaaaaccaatgtgtaagtgaacagagagaacaagaagtttaaggaaaattaaaaacataaaggacaaagtgagagaagagaatatctgtaaaatacatgaatacacacacacagtagatgtttcatggttgtttatcccccacctctcgctggaacacagactggtgccccacttcgtgcttgggatgtccttcctctgtttcttggctgagtcgaacttgtgctgcttcctttctccttaaatatcctttcctctggacaggatgttcctgaaggaggccacaaggcagaacatctcggctaactttagtttgctattttcagcctgaatttgtgcctgggcaaatcagtccacggacagagtatcctccccagttggatatttcttgcatgagcatcagaattttgtgggacacaaggcttagtttcactaagctctgagcctcaaaacctggtatgcatctgggttagagagcctcatccagtcttttttttttttttttttttttgagatggagtctcactctgtcgcccaggctggagtgcagtggcgtgatctcagctcactgcaagctctgcctcccgggttcatgccattctcttgcctcaacctcccgagtagctaggactacaggcacccaccaccacacccggctaattttttgtatttttttttagtagagacggggtttcaccgtgttagccaggatggtcttgatctcctgaccttgtgatccgcccgcctcggcctcccaaagtgctgggattacaggcgtgagccaccgcgcctggccctcatccagtcttaaaaaaaaattccctgagctgtagaatatatggtggacatattttctgcattccttttttgatgtaggtaggaaaaaaacccaaaaaaccccaaatcacaattgtccctccagggaactgagaagctggggtacttacccattgactcctgtattccattggttaagaaaagcttctggtggctttaagtccctaacacttttttggggctgtcttgcatcctgtgctggagacagctcttaggttaagagacacaggtgttcagcctgggcaacataaggcgacactgtctctgccaaaaaataaaaaaaataaaaaaataaaagccagggggtggtgcgtgcacctgtggtcccagcaactcaggaggctgaagtgagaaaattgctcgagtctaggaggttgaggctgcagtgagctgtgatcatgccactgccagcagcctgggcaacagagcaagactttgcctcaagagaaaagaaaaacagtcagatgcggtggctcatgcctgtaaacccagcactttgggaggctgaggcaagtggattacttgaggtcaggagttcaagaccaggctggccaacatggcaaaaccccatctctactaaaaatacaaaaattagctgggcgtggtggcttgcacctgtaatctcagctacttgggaggctgagttaggagaatcacttgaacctgggaggtggaggtgtcagtgagccgagatcaccccactgccctccagcctatgcaacagaatgagactccatctcaaaataataaaaaagagactagtgtgggaggatcacctgagcccaggaggcggaagttgcagtgagctgagatcacgccactacagtttagcttgggtgacagagtgagactctctcaaaaaagaagaagaagaagaagagaaacagatgtgtgtgtgaggtgggagctgccagcctgtccatcatagttgtagctaatctcagaagcaggccaaggggatttgctatagggcaccagcagtatatgctagaaagagaatgtagtacatgtactggcttgtagcacaggggacattctagttttaggcaatgctgaatcaagggcctcaaataatgtcaacaggacttgaactttcaccatcttttagttccttacaccttatatcctctattagtggcttctcacaactgtgggcttaatcctaccagtccaggagccccagtagaacagagcatcctttctaacacctgagctgactttcatggtcttgcttgagttctgtgcccagtcctgctctacggccaggaagctgtggccctctgattgaccagatctgagctaaacgcagtggtgtgttgataaatgtctaacaatagtctttttgagaaaataaaagttttgatttgtagtgtttcctgatttctatgatgtaagtacccccattagcttgaaaccatagccgatttcaattaccaatgtagtgtcaaccggtttacagaactcttgtcatgtcccatcagctctagtgagctagttcgagccagctcaaacacaatgctggctcatgtgtctcctgttgaacagaggcagttgaggcaccccatgcattccacagggactgaaggtggggaagggaaatcgggtgctgttgtcacgatttggggggcgaatagttgctgaatgggaaaaaccaggtctccatcaatcatacagacagacagagatcctgtctccaaaaaaaaaaaaacaaacccaaaaaactgcaacaaacatcttggtaaatatatccttataatataaaattatatatcctttgtttgtttgtttgcttgtttgttttgagacagggttctcgctctgtcactcaggctggagtgcagtggtgtaaactcagctcactgcaacctctaccttcccggcctctacctccctcactataacctcaacctcacacctcagcctcctgagtagttggtaacataggcatacaccaccatgcctggctaattttttgtatttttggtagagagagggtttcaccatgttgcccaagctggtctcgaactcctgagttcaagcgatccaccaccttggactcccaaagtgctgggattataggtgtgagccaccatgcccggccaccttatatatccttatatgttgtcttttctataacactggtcagcaaaccaaggcccacagaaaaccaaacccagtctggcacctgtttttgtttttgtttgtttgtttgtttgtttgtttgtttatttatttatttatttatttattttagatggagtctccctctgttgcccaggcttgagtgcagtggtgtgatcttggctcactgcaacctctgcctcccaggttcaagtgattctcctgtctcggcctctcgagtagctgggactacaggcacgccccaccatgcccggctaatttttatatttttagtagagacggggttttaccatgttgcctaggctggtcttgaactcctgacctcagatgatccacccgcctcggcctcccaaagtgctgggattacgggcatgaaccaccttgcctggcctggcacctgttttgtaaacaaagttttgcaggaacacagcaaactcattcatttacataatgtctgtagctgcttttgcagtaccccagctgaatggagtcattcagagactgcatggcccagaaagcctaaaatatttactctctggcaccctttacagagaaagtttgttaacctctgctctataatataggacctacattatggaaagggaaaaagatatatgttttaaaaaatttaacagacagccggatacagtggctcacatctgtaatcccagcactttgggaggccaaggcgggtggatcacctgaggtcaggagttcaagaccagcctgaccaacatggcgaaaccccgtctctaataaaaatacaaaaattagcaacgcatggtggcacacacttacaatctcagcttctcaggaggctgaggcaggagaatagcttgaacctgggaggtggagcttgcagcgagccaagatcacaccactgcacttcagcctgggtgacagagcaaaactttgtctcaaaaaaaaaaaaaaaagaagtgtacaaagaagaaagcccactcttctatcgcaattaccagtttggtgtaatagtccaatcaacacaataatcaatacacacacacacagttttgtcctttcttaaaacaaaaacaaaaacaaaaacaaaaaaacaggaatggatcagtaatttcctgtagctattatccccgaaatacttttgtattattctgcccgttttctgatagctcataatcaaagaaagatcactgcaggtgtttggacacaaaaatcctagcagctggtgcccctcgcagcagaatttcaacctgacacactgggagccagaatgtttgttggctctgataagctaataaccacatgtttcaatgtcccgtgtccctgaagaagccattttcatgtgactttcctgcttcagaccaggcccagttcactgagttaaaaaccaaaatgctcatcgtggcctacaagttcctccgtgacctggcctgtagccagttttctggtaccgctcttccccttggtctctgtgccttctttcacttcctccaagttgcaccaagccctttccggcctcggactgggttagtcagaactctttcagtttcaagtgacagaaacccaactcgaactggactaagcctttagagtgtattaggctcatacaaccgaaaagtcccaagaaggccgggcgtggtggctcacgcctgtaatcccagcactttgggaggctgaggtgggcggatcacctgaggtcaggttcgagaccagcctggctaacatggtgaaacccccgtctctactaaaaatacaaaaattagccaggcatggtggtgtgcgtctgtaatcccagctactcgggagactgaggcaggagaattgcttgaacctgggaggcggaggttgcggtgagccgagatcgcgccattgcactccagcctgggcaacaagagtgaaactctgtgaaaggaaggaaggaagggaggaaggaagggagggaggaaggaaggaatgaaggaggaaggaggaaggaggaaggaggaaggaggaaggaaggaaggaaagaaagaaagaaagaaagaaagaaagaaagaaagaaagaaagaaaagaaaaggaaagaaaagaaaagaaaagaaagaaagaaaggacggacccaagaaggtggattcagacatagatggctctagtctcccttggctgcccctagtctccactgcattatcttcattctcagtctctcccaaagggatggaaggatggtcctaaggttgcagcctaattagccatccaggtggaaagaggactctcatttcctctttattgctctagaaaaaggtcctgtgggccaggtgcaatggctcatgcctgtaatcccaacactttgggaggccaagttgggcggatcacgaggtcaagagattgagaccatctggccaacatggtgaaaccctgtctctactaaaaacacaaaaattagctgggtgtggtggtgcaaacttgtagtcccagctacttgggaggctgaggcaggagaatcgcttgaacccaggaggcagaggttgcagtgagctgagactgcgccactgcactccagcctgggctgcagggcgagactattctgtctcaaaaaaaaaaaaaagaagaaggccctgtggataaggctcattgaatcagctggcgtgacacaaccatccctgaaccaatcgctgtgatcagtagggtaggcttcactgatcagtcagccttgggtcttgtgcctcacaccctcccaccagcactggtgggggaatctgccccatctgaaacatgaacactggcaatcaagaagggaaatagccgcaggcaggcaaaaacaacaggtgtccacggcaagcctctgttcatatcctcccctctgcctggagcacccttcacccacttttcactgtgacagcaaggttatttttcacagctttggtagagcaggcaaaagattagaagtggcacagctgcctattaataagaaattgcactttgggaggctgaggtgggaggatccctcgagcccaggagtttgaggccagcttgagcaacacagtgagaccccatctctacaaaaaataaataaactagccaggtgtagtggtcctgtagtcccagctacttggaagcctgaggtgggaggattgcttgaatccaggagtttgaggctgcagtgaaaccctgtctctaaaaaaaaaaagaaagaatgtagagaataaccttgcttgtgcttcagacataggcagtagaatgccgaaataggcttgtccctgctccggagagccacttcctaaaaagtcaggaatcttaagtcagttgtacactgtaggtagcttgaaattagccatggtggaagtatttacaccacagaaatgggcaaatgctgcaaaccagggctgttttgtttgtttgtttttcccttggagagcctctttatcagcacaacactgccagagaggggtttgaaaagttcctctggtcagaggtcaaagagcactgacaattagccccaagaaatcagaacagccaggtatggtggctcatgcctgtaatcccagcagtttgggaggctgaggcaggaggatcttgagctcaggatttcgagaccagcctgagcaacatggtgaaactccatctctacaaaaaatacaaaaaattagctgcgtggtggtgtgtgcccgtggttccaactacttgggtggctgaggtgggaggattgcttgaacccgggaggttgaggcttcagtgagcttagattgcgccactgcattctaagcctgggtgacagagcaagaccctgttaaaaagaaaagaaagagaaggaaggaaggagggagggagggaagaaaggaaggagggaaggaaggaaggaaggaaggagagaaagaaaggaaggcaagacaaggcttggctttgggcagaagggagaaacttattgggtcaaaggaggaacagaagtctaggtagttgacttttcttccaaagtacagatccctttgaagtaaagccaaggcactatgagggtcgtgaccctgaatcatataaggtgccggctggtctttgtttaatgctcgctgatctttgttaaatgcactggttggtaggatagtgcttttgtctagagctaaggtcaaagaatattacactaaggcaaagatttctccctacttgcagtagggatcaaataggaaaatgaatgcaaacatttggaaaagtacgaaatagcctcccaaaatattaggcaaaagttagagaaaatgatgattcatgctacaataattactacctttccaaggaaaaatcaaatcctttatgcttctggcacagtaacattgcaatgtacattaccactcactgcattgcctcaacagtcatcatttcgtgcccccaggaaaggaaagttacagtgattcggaaaagcaaaaaaaatctccacagttattgacaacagtattcatggaggttaaagaggcagtttggcctcattttattgtgaactccggttcttataacagcaagaataatcatccacttttttttttttgtaatgcacccttgatgtgaaaatccaggaaataaaatgtttccaattcaagatgttctttccatataattcccagcatcctccctcccttagccctgagaccatcagacaggaccaagaatctctccctcccttctttcttcacagataactttctcattggccagcctgccctcagcccctgcactgttaaatgctagcggcttccttcctccctccctccctccctcctttccttccttccttttttatttatttatttattttttatttatttatttttttgagctaggatctcgctctgtcacccaggctggagtgcagttgtgtgatcatggctcactgcagcctcgacctcctgggctcaaacaatcctcccctcagcctcccgagtagctgggaccacaggcatgtgccagccaccacaactggctaatttttttttttttttttttttttttgagactgggtctcgctctgtcacccgggctggagtgcaatggcacgatctcgggtcactgcaacctctgcctcccgggttcaagtgattctcctgcctcagcctcccaagtagctgggattacagatgcctgccaccacgcctggctaattttttttttttttttttgagatggagtttctctctgtcacccaggctgaaatgcagtggtacgatcttggctcactacaacctccccctcctgggttcaagcgattcttctgcctcagcctcccaagtagctgggactacaggcgcgagccaccatgcccagctaattcttgtgtttttagcagagagggggtttcaccatattggccaggctggtctcgaactcctgacctcgtgatccatccacctcagcctcccaaagtgttgagattacaggcgttgagccacagcgcctggcattttttaaaaaaatattttaagtagagacggggtttcatcatgttgaccaggctggtgtcgaactcctgacctcaggtgatccgcctgcctcggcctcccaaagtgctgggattgcaggcgtgagccaccgcgcctgaccacaactggctaattttcaaatttttaatagagacaggggtctcactatgttgtccaggctggtcttgaactcctggcctcaatcaatcctcctgcctctgcctcccaaagtggtaggattacaggcgtaagctgctgtgcccggactacctctttcttaatatgcaaattgtccccacgtagtaggggctcaaaaggaaggcggtgctggggtgaaagcaggcatcaatttaagcagttcttagactagagccataaaaccaaactacactgtctgtcatcacctgaagagaggggctgttccaggcgcagctgggaacacagcagcaaactgggtttcccaaacgtgagttaaccagcatcttacacgcgggttaaaatgtccccttacgttatgagatgtagggaaggggtggttcctgatcaagaaggccacttcaaaccagatgactttgcttgtctgcatagagcctgcactgtgcatggctgccctgtgtcacagatgggctcttgcttccttctgtcaatttcaggaaagatgtgtgctgggagacctggggcaggaagagagggatgcccctaactacattactctgtagaatcagattaagatgctcaagtagaggggcctaggagagggaaggagttcacggaagggcaagcagagaggaggaggaatgatttccagcatccccatcttccctgtccctcctgctccactgctctgagcactccctccctgcacagagggactagaaataggatctcagggctgggagagcaatggctcatgcctgtaatcccagcattttgggaggctgatgtgggaaaatcacttgagcccaggagttcgagaccagcctgggcaacacggcaaaacccccatttcattattgttattatttttaaagacagagtctcactctgttgcccaggctagaatgcagtggagtgagctcagctcactgcaacctcagcctcctgggttcaagagattctcctgcctcagcctcctgagtagctgagattacaggcacccaccaccacacccagctaatttttctattattggtagagatgggggtttcaccgtgttggccaggctggttttgaactcctgacctcaggtgatccacccacctcggcctcccaaaatgctcggattataggcgtgaaccaccgtgcccggccccaaacccccatttctacaaaaaaaaaaaaaaaaaaaaaattagccaggtgtcatggtgcatacctgtggtctcagctactcaggaggctgaggcaggaggtttggttgagcctgagaaattgaggctgcagtgagctgtgattataccattgtcctccagcctgggtaacaaagcaagaccctgtctcaaaaaaaaaaaaaaaaaaaaggatcttgggacttttcacagggcccagggcccaggcctcccatccagagagggcctcccaccaagatgtgcacatcccctctgacaggaccgagttttaaaaatcaacaacagtgttggtaaccctatttggtttttctgcttttttctttttcattaagtgagacctttaaaaaacagaagtgccttggtcttctctcaacctctgagaggccctgtgtgctgcgggcatctgcttttcagctgggaaagttcagcctcctcccactccacagcctctctctggctccaaccatcagcccccagctggggtgtcaggtgggaccttcagaaaggtggtgtcttgagttgagttcctgcagaagctgactagggacagactccgtgcaatagtggcatgagccactgtgcctggccacaaatggctttattttatgtattaaattaataattagggctgggtgcggtggctcaagtctgtaatcccaacactttgggaggctgaggtgggcggatcagttgaggtcaggagttcgagaccagactgggcaacatggtgaaaccccgtctctactaaaaatacaaaaatttggcaggcgtggtcgcgggtgcttataatcccagctactcaggaggccaaggcagagaatcacttgaacctgggaggcagaggctgcagtgagctgagattgtgccactgcacgccagcctaggcaacagagtgagactctgtctcaaaaaaaattaattaataattattaattaatttgcccaggctggagtgcagtggtgtgaatacagctcactgcagccttgaactcctgggcgcaggtaatcttcctgcctctgtctcccgagtagctgagataacagttgtaagccaccatacctggctaattattttattttttgtagagatgaggtctcactttgttgcccaggctgggcttgaactcctgggctcaagcgatctgcctgcctcagcttcccaaagtattgggatcacaggtgtgagccactgtgcctggccacaaatgactttctgagacccatctcctccccatttctaatcttaagaaaatcagaggatcaggccacattgggcccacgtccctgtcttgcaactcttggttgaactgagaagtgactgcctcttttatttatttatttatttatttgtttgtttgtttgtttgtttgttttgagacagagtctcgctctgtctcccaggctggagtgcagtggcacaatctcggctcactgcaacctccacctcccgggttcaagcaattctcctgcctcagcctcctgagcagctgggactacaggtgcgtgccaccacgcccagctaatttttgtattttcagtagagacagggtttcaccatatcggccaggctggccttgaactcctagcctcgtgatccacccacctcgcctcccaaagtgctgggattacaggcgtgagccaccgtgcccggctgtgactgcctcttttaaatagagccacgctttcctctgggtccccatttggtgcatttcacaccttttgttagttcagtgtcaatatcttgcctctagagaagtcagggaccatttctgtcttatccttctaaaaccctcctcccaccctcctagtcacttgctaccccacccacactgtctccctgtggcttgcacacgttccctttgcacctgtacttccctctgtctgcccagaacactctctttccagagttcctgctggctcacacactttctgctttggtacagatgagcattcttggaaaccaagtgttaaggacagtggagccacaagataggggttcaggaacatggatccccgaatctgtacctggtggaggaggaactccattgatcaggaactcctattgtgaaatttataggagaagaactaaatgattgcatcaaaccatcaagatttggagcttatctgtccatgaccctggcagtaccctaaatgatgaacaaggtgagtcacatttggggtggaatgcttgcaagctcgcttgtccacacaccaaaagccatattcgccagccagcattgttggggataatggtgatcatttgttctcactctgagacaagcatttgtctttcaaactattctgaattcaggtgatagaaaaggatgttgcttattacgacacttaaaattccaacaagaattaaggcctgaataataccatgggtggtattgatggtattgatggggagaagggaggaacaggttctgaaacacatataaaaaattcgatcggatggcacaattgttttccaggcaaaagagcaaaccaaactatttttaaatgtcaagagctaaatagcctggagaaaatgtaatatattacaagcagtaagcaacagacctacacataagttgatacctttcaacataacagaatggcgagtcctggcttaaccttctgcacttccaaaccggttccctcctagaattaacattttcttgtcatcttagagtaaaggctgtgcattctcagccattaagtcttccaggctgaaagctttccttaaacttgtttcaatccgtctttgattctgaaatgctccaattacatttccatagtggccatgttaattaatggtgatgatcagacttaatgaaagagggaattagtaagccattccctggccactttcataaaaagggagagtgctaacaagtgctaatggcctgacatggaaacctcaccttccccggagcttttaacctgcagtcacatcctgaaacataacccgaaggctgctctaagcaactgggtgtttgatcttcttcttgtaagcagagctacttatactcagatttctcaactgaattcatcctagaaaatagggccttcaggcctggcatggtggctcacacctgtaatcccagcactttgggacgctgaggtcgggggatcacctgaggtcaggagttcaagaccagcctggtcaacatggtaaaaccctgtctctaccaaaagtacaaaaattagccaggtgtggtgtcacatgcctgtagtcccagttacttgggagtctgaggcaggagaatcgcttggacccgggaggtagaggttggagtgagccgagatcgcaccactgcactccagcctggtaacagagtgagactctgtctcaaaaaaaaaaaaaaaaaagggggccttcaagcagcaagagatttgggtccagaaaaccatgactggcaaaagccaataattttgcccacagacttaatagttgcattatcatgtagtatacattgttatgttagtatgttatatgacattatattattttataaaattatgggcttttttttgttgtttggttttttttgagacggagtcttgctgtgtcacccaggctggagtgcagtggggtgatctcagctcactgcaacctctgcctcccaggttcaagcgattctcctgcctcagcctcccaagtagctgggactataggcgcatgccaccacgcttggctaatttttgtatttttagtagagacagagtttcaccatattggccaagctggtctcaaactcctgacctcgtgatctgcccgcctcggtctcccaaagtgctgggattacaggcgtgagccaccgcgcccggccaaaattatgttttataattttcttttttattttatttatgttatctactgcacaagaattaaagctctctgtgtatggccaggcctggtggctcacacctgtaatcccagcattttgggaggctgaggcaggtggatcacttcagatcaggagttcaagaccagcctggttaacatggtgaaaccctgtctctactaaaactacaaaaattagctgggcgtggtagtgcgtgcctgtaatcccagctacttcagaggccgaggcaggagaatcactttaatccgggaggcggaggttgcagtgagccaagatcccaccactgcactccagcctgggctacagagtgactccgtctcaaaaaaaaaaaaacacctccttgtgtagaagtttggtattgttcacttctgcatcctcagtgtctataagagtgaacaagctgggtgtggtggcatgcacctgtagtcccaacgacttggaaggattgcttgaacccaggagtttgaggctgcagtgagctataatcacgccaccgcactccagcctggatgacacagggagacccagtctcaaaaaaaaaaaaaaaaaaaaaaaaaaaaaaagcaggtgcggtggctcacgtctgtaatcccagcactttgggaggccaagacggttgggtcacatgaggtcaggagtttgagaccagcttggccaacatggcaaaacccagtatctactaaaaatacaaaaactagccaggcatagtggcacgcgcctgcagtcccagctactcgggaggctgaggcaggagaatcgcttgaacccaggaggcagaggtttaggtgagccaagatagcgccactgtactccagcctgggtgacagagcaagattccatctcaaaaaaaagaaagacaatcacaagttttttgttgttgttgtttttgagatggagtctcgctctgtcgtccaggctggagtgcagtggcacgatcttggctcactgcaagctctgcctcttgggttcacgccattctcctgcctcagcctcccaagtagctgggattacaggcgcccaccaccatgcccagctaatttttttgtatttttagtagagatgggttttcactgtgttagccatgatggtcttgatctcctgacctcgtgatccaccctcctcggcctcccaaagtactggaattccaggagtgagccaccgcgcccggcttgttttttttttttttttttgaaatttttgtgtttttagtagagacagggttttaccatgttggccaggctggtcttgaatgcctgacctcagctgatctgcctgcctcagcctcccaaagtgctgggattacaggtgtgagccactgtgccctgaccccatcttgtttttttttgttttttttttttttgagagggagtctcactctgccacccaggctggagtgcagtggcgcaatctctgctcactgcaccctctgcctcccgggttcaggcaattctcctgcctcagccttctgagtaactgggattacaggtgtgcaccaccacatccggctaatttttgtatttttagtagacatgaggtttcaccatgttggtcaggctggtatcaaactcctgaccttgtgatccacctgcctcggcctcccaaagtgctgggattacaggtgtgagccacacgcctggcccccatcttgtttttaaactccaaactgcccttggtcactcttgagtgtggagtgagctaacattgggagaaatttagttcatagtttaaaggataatggctcttccctaaactaagctgctttataaaactaataaaaggccacaagtttaagattataagaggggtctgaattctgctaaaatgtaggcatagttaaataattaccagccattgttctggaagtcacaacttccccagttagtcctgtaaataacatcactattataaaacttaagattggggccaggcacggtggctcataccagtactcccagcactttgtgtgccaaggcagaattgcttgagtccaggagttcaagacagcctgggcaacatagggagaccccgtttctacagaaaacaaaacaaaacaaaaatagcagtcatggtggtgcatgcctgtggtcccagctacctgggaggctgaggcaggaggactgcttgtgcctgggtggtagaggctgcagtgagccatgatcaaccactgcactccagcctgggtgacagagtgagaccctgtctcaaaacaaacaaacaaacaaacaaaaaacaaaaccaaagaaaccaaaaaaacaaacaaaaaaaaccaaaaacctaagattggccttccaagatatcttttcagatttttgcatttctgactactaggtaactccacttggatcagcaactcctctgtggcccttacccagaagcagactcagtgcacaaggactgttttccacagccctgtgattgcatccccaaccagtcggcagcacccattccctagcctcctgcctcctatccttgaataaccctagccttcaaatttcgggggtggttgatttgagtaataataaaactccagtctcttgcttagccaactctaggcatattaagctctttctctattgcaattctcctgttttaataaattggctctatctgggcagtggggaaggagaacccactgggcagttatgtacctatgtaaatgcatactaagaattttggaggctgggcacagtggttcacacctgtaatcccagtgctttgggaggcccaggcagaaggatggcttgagcccatgagttcaacaccagcctgggcaacatagtgagatctcatctctccaaaaaaatttttttttaaattacctgggtgtagtgacaagcacctgtagccccagctacttgggagactgaggtgggaggatcgctaaaacctgggacgtggaggttgcagtgagcagagatcacatcactgctctccagcctgggtgaccgagcaagatcctgtctcggaaaaaaaaaatttttttttggaagaatctacctaaaacctatgacagtggttacttcaggggaagggcctgagattgggaactgtagttgaaggctacttcagatttacctggaatgattctcagccaggggtgattctgccctttttttttttttcttccttctgctttttgcagagcagggctaccccacaggcaatgcgcccgaagtagttgattctgctctctagggatattgggcaatgtctggagatattttgggttatcacaaatggttgagatgggggagggtgctactagcatccagtgggtcaaggccggggatactgcaaaatagtccacaatgcttagcacagcccccgcaacaaagaattatccagcctaaaatggcaatggtgctgaaattgagaaccctgatctggatcattttaacttttataaggagataggattcaagtattatttgcataatttaaaaagggctgaaaaaacaatgatgtggcggggaggagtctctctgaaactattttggtctgggaggctgcctgattaaaaaaaaaaaaagacagggatgctgtgatccaccgtccaccttcccttccctctgcaggacacagcaggtattcccctagctgccaggagtgttagctgctactccctcacattctgatgagtccctcttcagaaattgccctgagctgaaggaagctgccttgttcaacagcctttctccttgagaagcctctgcactgttgacatcatgctttgtagcaggggttgggggaagtgtcctgtgccctgtaggacacgtggcagcattcctggcctctatccactagatgctagcagccccctctttttttttttttttttttgagagagtcttgctctgtgccccaggccggagggcagtggcatgatctcggctcactgcaacctctgcctccagagttcaagcaattcaattctcctgccacagcctccgaagtagctgggattacaggcgcgcaccaccatgcccagctaatttttgtatttttagtagaggtgggtttcaccatgttggccaggctggaccccttctcctattaaaataaccaaaaatatctctgaacatcaccaaatatcctctgggaggcaaaattctccccctccctgcattaagaaccactgatgtacccagtgcctggttaatacagcagcacaaaggcccagccccctgacctcagtttggagtatctctgagggccatctcaggctttgttgagattgcatcataaattcctctctttacccaatcctccttccctctccccatcataggtgttgttttccagagcattctccaataaatattctggtgcaaatctccctcccagagactgttccttggggccactgacccaagaccaagacgaaggcttaggggggttaagtggcttttcaaaggtcccacagcaggctggatgtggagctaagactgtgacctttctcctcactccacaattggtgctcacaagcattgcgcttcaaggccttattcttgggctctgctgaccacagctatctttttctttttttttgagacagagtctcgctctgttacccaggctggagtgcagtggcatgatctcggctcactgcaatctctgcctcctgtgttcaagtgattctcctgactcaacctcctgagtagctgggactacaggtgcccgccaccatttcctactaatttttgtatttttaatagagatgttgcccgccttggcctcccaaagtgctggcattgcaggaggagccactgcacccggtgcgcaactatccttgatctctagaggacttttcaacccccttgcctaccccatgtgtatttctataatagaagaaacagaagaaaaattcatagaatgtgcaacccagtggcatgaacttcagccctcttcctttgttgttcttaagcaatatatcttgtagttgtgcttgtctgcaccctctcaactggttgacagccagcaagttcaaacacatagacttttcaactacaagtatctaatatgattgcataaagtcctttgtgctcaaaaaacttaaaaaattttttttgttttttatagagacaaggtcttgctatgttgtccaggctggtctcaaactcttgggctcaagcgaacctcccatcttggtctcccaaaatgccggaattacaggtgtgaaccactgtgcctggccagaaaacttttttgtgtatttgttttttgtagagatggcagtctcactatagcccaggctagtctggaactcctgggctcaagaaatcctcccacctctgcattttttgtttttgttttttgataaaagtatggatgtgagataatgggcccatacaagtatgtggctgggacaaggtcatttctcggtatgatggtccatttctaacatcatgggacagttatggaggttagaatgctgtggtctggtgtgagaactcttgctatgccaataataataataaacattaggctgggtgaggtggctcacgcctgtaatcccaggactttagaaggccgagaccagaggattgcttgagcccaggagttcaagaccatcccgggcaacatagcgagacgctgtcctgttaataaataaaaataaaggctgggcgcggtggctcacgcctgtaatcccagcactttgggaggccaaggtgagcaaatcacgaggtcaagagatcgagaccattctggccaacatggtgaaaccctgtctctactaaaaatacaaaaattagccgggcgtgatggcaggtgcctgtagtcccagctgctcaggaggctgaggcaggagaatcgcttgaacccgggaggcggaggttgcagtgagctgagatcgcgccactgcactccagcttggcgacagagcgagagtccgtctcaaaaaaaaaaatcaataaaaatataaaagaataataaacattaatcgagctattgctatataccaaacactacatacttatatatatatttatgtattattaaatatatactatattaatatataatacatataatgtattttataattaatagttaatagtaacataatattaatattatattactgtatgtatatatactgtataggtgtatgtatactgcattgtactttactatatttactgttatatatatacatacatatttataacatataaaataacattatatatcaagttatcaataggcagatattgttatttcacccacttactggtgagaaatctgagtcacagagaagctaagtaacttactcaaagtcacacagctagtaaatggcagagccactccagcctgcatgaccgctcttcattttcagaaggtgcggctctaactcagagcacatttattcaactgaatgcatttatgaggaagatcttgaaagcctgtctccctctctccctcccaacacatcaaaaaataatggaatgtaaaacaattggctggtcttcatcttaaactggtcggcttaagctggtcagtgtcaaccaggttcaagttatggaactgtgtgtaaatgttgaaaatgtatcattgtatcttttttttttttttttaagagacagggtctccatatgctactatgactagcagcatagtcatagctcactgtaaccttgaactcctgggctcaggtgatactcctttcacctcagcctgctgagtaactgggactatagacaggcaccaccacgcttggctaattttttaattttttgtacatattggagtctcactatgttgcccaggctggtttctttcttttttttttttttctcctgagatggagtcttgctctgtcacccaggctggagtgcagtggcgctatctcagctcattgcaagctccacctcctgggttcacaccattctcctgcctcagcctcccaagtagctgggactacaggcacctgccaccacgcctggctaattttttgtttatttttagtagagacggagtttcaccgtgttagctaggctggtctcaatctcctgacctcgtgatccacctgccttggcctcccaaagtgctgggattccaggcatgagccatggtgcccagcttgcccaggctggtttcaaactcctgccctcaggtgatcctcccacttcagcctcccaaagcattgagattagaggggtgagccaccatacctagccctgtgtattgtatcttaaaaggaaaatgtaattatggatttatggtatattttcttttttttttgagacggagtctcactctgtcacccaggctggagtgcagtggcgcaatcttggctcactgcaagctccgcctcctgggttcacaccattctcctgcctcagccgcctgagcagctgggactacaggtgcccaccaccacgcccagctaagttttctgtatttttagtagagatggggtttcaccatgttagacaggatggtctcgatctcctgacctcgtgatctgcccgcctcagcctcctaaagtgctgggattacaggcgtgagccaccgcgtccggccaatttatggtatattttcttgcattgaaactggaaactcttgcaacacataagtacattattcaacttccagttattcaagaaacactctaatttttttagccatcatgtattgcataaaaacagtgggagagttgatcaattactcactgtttatttaaagctgtggtttaaacactttctgtatagtatctctttattgaaggattgttgagagagctggaattacctctgtcactcatctttgtgctaagaaaccctgatgtgtgttttgtattggttagtttttgcttctctactgatgaacaggatctgatcaagttgagcttgcagtagaataattcacagaaaagtgcagggtgcggtgagtcacgcctgtaattccagcactttgggaagccaaggtgggtggatcacgtgaggtcaggagctcaagaccagcctggccaatgtggcgaaaccccgtctctactaatagtacaaaagttagccgggcatggtgacgcgtgcctgttgttccagctactcaggagattgagtcaggagaattgttggaacctagagacggaggccgcagtgagccgaaatcgctccactgcactccagcctgcgcgacagagcaagactctgtctcaaaaaagaaaaaagaaaaaacaaaaaagaataattcacagaaaagttaagaaaggttatctatggcctcttaatcttcctgatctgaaacggcaacttggggtaagggaagaatgttgaggaagtggagcataaaaaaaaaaaaaaaagaggaagaagagaaagagaagagggagtgagggggagagagagtgaggaaggaagggaagaagggagggagggaggaaagagaaaaggaaagaaagaaggaagaaaaaaggaaggaagagagaaaaagagaaaaggttggtgtcataaatagtgtaaatatacttaataagcaagtgaaatcaaaggctgagtagtacgtcatactgatgtctagtattttaaaatttaggctgggcacggtggctcacacctgtaatcccagcacttcaggaggcagcggcggatggatcacctgaggtcaggagttcgaaaccagcctggccaacacggtgaaaccctgtctctgctaaaaatacaaaaattagccaggtgtggtggcgtgcacctgtaatcccagctactccggaggttgaggtaggagaatcgcttgaacccgggaggcggaggttgcagtgagccaacattgtgccattgcactccagcctgggagacaagagtgagactcagtctcaaaacagaaaaaaaataaaaaacatttttaaaaaaaaggaaaaaggagaaaaatttggacacagagacatggacatacaaggggagaaggcaggtgaagatgtaggcagagcatggagtaatgcatctacaagccagggaaaaacaaaaattgctggcaacctctagaaggtacaggtggcaaggaaggaatcttccctagaggtttagaagggagtccagccccgctgacaccttgattttgagcttctagtctctggaactgtgaaagaacatgttttggttgtttaaagctactaagtttttggtaatttgtcattgcagccctacgatacaaatatattcacaataaaataaatgaaaattaaaattatactgacatgccatttttaacccgccacttagacaaagatcaaaaagcctgataacagactaagttagaaaatgtgttgggaaattgattgcttttatttgctgctggtgggagtgaatgtaaactgatataatctctagaaattacttgacaatttctatcaaaattacaaatgcacatatcttttgacccagcaattctgcttctaggattttctgacattggagaaagttgcatacgtggacaattgcacatggacacgttatgtatcacagcactctctgtaaccacagacatttggaatgaacactaactgttcattgtcaagcgatgtttgagtacactgaagaacatctatacttggagtcagcaaactttttacataatgggccagagagtaagtactctaggtttgcagacccagagggctctggtgcaatgactcaactctgcagttgtagctcaaaagtagtcatacaggctgggcactgtggatcacgtctgtaatctcagcactttgggaggctgaggcgggtgaatcacctgaggtcaggagtccgagaccagcctggccaacatagtgaaacctcgtctctaccaaaaatacaaaaattagccggtgtggtactggacacctgtaatcccagctactcggaaggctgaggcagaagagttgcttcaacctgggaggcagaggttgcagtgagctgagatcgcaccattgcactctagcctgggcgacagagcgagactccgtcttaaaaaaaaaatgtagtcatatatcatacatcatatataagtgaatgggcatggttgtgttccaataaaactttatttacaaaaaacaggcaatggccagatttggcccatgagcctgtttgctgatccctgatctattcaatggaatattatgagctgaaaaattagtgaggtggctatgttctgctccacagtgacttccaagattaagtgaagaaagcaagattcagaacagtatggatttgtcagaaaaaaatatataaatttatataaagaattatttgtatattcacaggcaatgtctggaagtatccataagaaagtggacccattacttatttctgggataggaaactgggtggctcagtgtctcagtggggaagatattttcctttgtgctttttgaattctgaaccaagctgaaattattacccattcagaaaacaaaataaaaatgtgaaaaggtaagcaaatttatttccctaccacatactttttctttgcagggccagtgagcacaaatggtttttagttccgtttttgtttgtttgtttgcttttaatagagatgacatctcactttgttgcttgggttggtttcaaaaaggcaaatttttcttctttcttttcttttttttgggatggagtctcgatctgttacccaggctggagtgcagtggcaccatcttggcttactgcaacctctgcctcccaggttcaagcaattctcctgcctcagcctcccgagtagctgggactacaggcatgcaccaccaagcccagctaatttttgtatttttaatagagacggggtttcaccatgttggccaggctggtctcgaactcatggccccaggtgatccttcggcctcagcctccccaaatcctgggattataggcatcagctatcacacctggccgggttttcacatttttggatggttgaaaacaaccccaaaaagaataatattttgagaagggggtgggggaaaaaagaatattttgtgacaaaagaaaattatgtgaaattcaaatttcagtgtccacaaataaagtgtaatggaacacagccctgcctattcatttgcattctgtctatgattgctttgccttacactggcagacttgagtcattgtgacggagagcccataaagcctaaaatatttatctggtcctttacataaacagtttacagattgttgttctagattaaagaacaaaacaatctttcacatgcttctacaaatagaaagttcatatttaatattgaatgaccattccatgaggactttaaaaaatgaaatggcttatgaagaactcaaaattaaattgtgaattttcttgcttcttcttagagaatattttaaaaagctgtggcctctaaacaaaaataaagcacttatcccatctgtctgggtctcactgtgcaccgtgttggtgaggccatcagaatgaaaatgtatcacaacccaccttcccctttatttttatttcttattttattttatttatttatttttttgagacggagtcttgctctgccacccaggggcgcgatctcggctcactgcaagctaggcctcctgggttcacgccattctcctgcctcagcctcctgagtagctgggactacaggtgcccgccaccacgcctggctaatttttttgtatttttagtaaagacggggtttcaccgtgttagccaggatggtctcgatctcctgaccttgtgatccacctgccttggcctcccaaagtgctgggattacaggcgtgagccactacgcctggccttatttttatttttaatttatatatatatatatatttttgggggggggggcagggacagggtctcactctgttgcccacactggagtgcagtggcgtgacctgggctcaccacaacctccgcctcccgggttcaaacgattctcctgcctcagcctcccgaatagctgggattacaggtgcgtgccactgctgccggctaatttttgtatttttagtagagacagggtttcaccatgttggccaggctggtcttgaactcctgggctcaagtgatcctcctgcctcagcctcccaaagtgctgggattacaggtgtgagtcactgcatccgcccctccctgtcccttatttgacagaaaattcaaagtacttgatgttaacaaaaagctgagatgacctggaattgcttttaatttttactaagaatgaatcaaagctttctgttgttgttttgatggtgggaagaacacacttgtgcctttttttttttaaatcaccgataaaacaaggatacaaggaaactctgccttctgaaagttttgttcttggtttataagagacaataaacccacataaaaagttatgtaataagaggacagtcaataactatgttttcaaccttttcggcaatgatccacagtaaaatatatgttttatactatgactcagtagatacatatatacacacacaaaaaaataaaaatatggggctgggtaaggtggctcacacctgtaatcccagcacttagggagatcaaggtgggtggattgctcgagcccaagagtttgtgaccagtctggacaacatagcaagaccccgtctttacaaaaaaataaaaaaaactagccaggtgcagtagcatgccagtggttccaacagctggggagactgaggagggaggatcacctgagctcaggaaatcgaggctgcaatgagccatgatcatgtcattgcattccagcctgggcaacagcaagaacctgtttcaaaaaaagagaaaaggcaaaaatttttttttcttgagacagagtctcactctgttgctcagggtggagtacagtggtgcgatcttggctcactgtaacctccaccttccaggtttgagtgattctcctgcctcagcctcccaagtagctgagaatacaggtgtgtgccaccaggcttggctaatatttgtatttttagtagagatggagtttcaccatgttgaccaggctggtcttgaactcctgacttcaggtgatctgcccacctcggcctcccatagtgttggggttacaggcatgagccactgtgcccagccagaaaagacaaatctatttttttgtttgtttgttctttttttgagttggagtcttgctctgtcgcccaggccggagtgccgtggcgccatctcggctcactgcaacctccacctctcgggttcatgccattctcctgcctcagcctcccgagtagctgggattacaggcacgtgccaccacacccggctaatttttgtatttttagtagagaaggggtttcgccttattggccaggctggtctcgaactcctgacttcgtgatccacccgcctcagcctcccaaagtgctgggattacaggcatgagccatcgcgcccagccagaagagacaaatctattaaggcaaaaagtacattagtggttgcctggagctgggagtgggatcagagattaaggataagcaggcctgagagttcctgctggggtgatgaaaaagctgcattatattaaaaatttactaaaaataatcgaattacacaaacaaaagcagtagatttcatggcatgtaaattacatagcaataaaactgtcttttaaaaaagagaggaagaaaagaagaagcaaaagaaaagaggccgggcacagtggctcatgcctgtgatcccaacactttgggaggccaaggcgggtggatcacctgaggtcaggagttcgagaccagcctggctaacacggcaaaaccttgtctctactaaaaatacgaaagttagctgggtgctgtggcgtgcgagtgtagtcccagctacttgggaggttgaggcaggagaaccgtttgaacccaggaggcagaggttgcagtgagccgagatcacaccactgcactccagcctgggcaacagagcaagactccgtctcaaaaaaaaaagagagagagagaaaaaaaaaaaaaaaagaggaagaggaagcggaagaataaccacccaaaccaatcggtctgcagggcttgggattcagcttttaaaaattacatacatttgcccaactccaatcttccagttgttcccactctccacaatttcttgaagattactgcctgcatttcctcggtcacatgtgccaattatttcagtcctctggaatgtcattcatcaggtttagaaacttttcgacaaggtgaatatggtaacgaagtccaagagttggatgttttcccgcccttctgaacctcttcccttcgcatactcttctcctctgatgacttctcctttagtccgtgtttacattttgtgatttcttagacgtgagctcctaggcaacagaaagagctggggtagttgcgtgcacagtgagatgcaccttaggaaactgtgggcttctggggtggccttcccctaagttccctgtgtgactgttgtagatgtttgtagctcagtctacctagcaacccctcctccttctggaaacagctctaggtttcctgggtggggtttccttctcccccttggtgtctgtggtcctggtgaggcagaccgccacccatgggctccaggaataagcaggcgactcaggtcaatccggacaccaacatagctcagctctggctgtggtgattggctgaaagatggacatgtgacctaagagagtccagtgaaagtcagttctgagatgttttctagaaatactggaaaagagatgttctttttctaccatgattgctttgtggtgggatgtaaggttgactgctgtgagcctcgctgggccaccatatgggaaattaccaagaatgaagcatttacctttcctatagtccctgaaaaaaaaaaataaaaataaaaatgaaaataaaaataaaaatgaagctaacacaggccgggcactgtggctcatgcctgtaatcccagcactttgggaggccgaggtgggcacatcacccgaggtcaggagttcgagaccagcctggccaacatggtgaaaccccgtctctactaaaaaaattacaaaaattagccaggcgtgctggcatgtgcctgtaatcccagctactcaggaagctgaggtaggagaattgcttgaaccctggaggtggaggttgcagtgagctgagatggtgccactgccctccagcctgggcgacagagtgagatccgtctcaaaaaaaaaaaaaaaaaagttaaataaaggaaatggatcaggaaatagagacagccagacgcagtggctcacgcctgtaatctcagcactttgggaggccgaggcgggtggattgattgagaccaggagtttgagaccagcctggccaacatggtgaaaccatacaaaattaactgggcgtggtggtgcatgcctttaatcccagctactaaagaggctgaagcagaagaattgcttgaacccgagagatggaggttgcagtgagctgagatcgcatcactgcactccagcctgggctacagagcgagactctgtctcaaaaaaaaaaaaaaaaaaaaagaagctaacacaaaggaaatgaatcaagaaatagggaaacagtactgatctcactgtgtgagcctctgggtccatccatacctaaagctggtacaagctgtacccttgctatcaggtgagcctgtgaattctcttttcataaccaatttgatcgtgatttttgtcacttgttggcaagaataacacagtgtctggccaggtgcgatggctcacatctgtaattctagcactttgggaggccaagggcgagggatcactggaggtcaggagtttgagaccagcctggccaacatggtgaaaccccattgctacaaaaataccaaaattagctgggtgtggtggcaggcacctgtagttccagctactcgggaggctgaggcaggagaatcgcttgaacccgggaagtggaggttgcagtgagccgagatcatgccactgtgctctagcctggatgacagagtgagactctgtctcaaaaataaataaataaatacataaataaaataaaataaaaataaaataatgaataaaatttttaaaaatgtaaaaaaacccatccaggaatggccagttatttcccaacatccattttttgcccttcttcacattaagagagtccaattttttctctttttttttgtgaggggacagggtctcagtgtgttaccgaggctggagtgcagtggaacaatcacagttcactgcagtctcgacctcctggactcaagccatcctcccacctcagcctctcaagtagctgggaccagagacacgtgccaccacacctggctaaattttttttcttttcttttttttttttgtagaaacggtctcactatgctgcccaggctgttcttgaactcctggactcaagtggtcctcttgtctcagcctcccaaagggctggaatgataggcatgagccactgtgcttggccagattccaatttttattctagcacgttgccacctagaacttagaataaaggttaaatttcccggtttcctttgcagttaggtatagatgaaaaagtagtgtcactttatagcttagtcatatgtctaagttctggccaatgagatgtaagttgacatgagtggaggctcccagaaaggaaagggtgcacccttttctcccttcccgcttcctgctgccaggaatgcagatttgatggatggcattccagccactatcttgagtcatgtggatttaagaatggaagcagacagacagaaacaaggtttctggggaaagaggacccaccatgccagccttggagaactaatctatagacttcttttacatgagaagagaaataaacttttatctcattgaagccaccaatctgtcctgtctctgttactatatccaaagttgagtctgattgacagtgccatgttcctcacaccctggccacatgttgtattatcagttattttttcatttagcctatctgacaggtgaaaaagtagtgtcacttcatagttgtaaattcatttctgataagagctgatcttatttttgtagattttgagccatttgtgggattttgggtctgtgaaccatcttccctcccttcccctcctcttctctcccctcccctctcctctcgtctttcttttctctccctgtctctctctctccctttctttcttccttttttttttttttttccagacagggtctggctctttcacccaggctgcagtgcagtgctgcaattatgaatcactgcagcctccacctctctaggcttaagcaatcctcccatttcagcctcccaagtagctgagactataggtgtgcgccaccatgcccagctaacttttttagggatggtgtcttgccgtgttgcccaggctggtctcaaacggctgggcttaagcaagcctccagccatggcctccccaagtgctgggattacaggccccatttctttctttctctcttttttttttttttttttttttttgagatggagtcttgctctgtcgcccaggctggagtgcagtggtgcgatctcggctcactgcaagctccgcctctggggttcacgccattctcctgcctcagccttccaagtagctgggactacaggcgcccaccacctcgcccggctaattttttgtatttttagtagagacggggtttcaccgtgttagccaggttggtctcctgacgttgtgatccacctgcctcggcctcccaaagtgctgggattacaggccccatttctttcttgactccattctcagtcagccccattcctgtgattccaagatggctgccagcagctctggactttcatcccacctctcagcaccctcagcagggagaatgccgctttcctggatggtgcaacaaaagtttagggattgtcacgagaaagagaggacaagccacagactgagagaaacatctgcaaaaacatatcttgataaaggtcttttatccaaataacacaacaatccggctgggcacagtggctcttgcctgtaattccagcactttggaggctgaggcaggtggatcgcctgaggtcaggagttcgagaccagcctggccaatacggcgaaacccagtctctaccaacaatataaaaattagccaggcgtggtggtgcatgccataattccagctactcaggaggctgaggtaggagaacggtttgaacccaggaggcagaggttgcagtgagccgagatggcgccattgcactccaacctgggcaacagagcgagactccgtctcaaaaaaaaaaaaaattaattaattaaataaaaataaaaataaaaaaacacgtaactcaacaatctgaaaatagagctgggcatggtggcatatgcctgtagtctattcaggaggctaagctaaaagaatcacttgagcccaggagttcaagattgtaatgtgctatgatcctgactgtgaatagccactgcactccagtttgggcaatatagcacgatgctgactcgtttaaaaaaacacgaacgtgaacgacctgattaaaaaatgagcaaggccaggcgtggtggctcatgcctataatcccagcactttgggaggctgaggcaggtggatcatgaggtcaggagttcaagaccagcctggccaagatggtgaagccccatctctactaaaactacaataattaggcgggcatggtggcaggtgcctgtaatcccagctactcaggaggctaaggccggagaatcgcttgaacctgggcagcagaggttgcagtgagccaagaacacaccactgcactccagcctgggcaacagagtgagacctcgcctcaaaaaaaaaaagccagaggtggtgactcatgcctgtaaatccagcactttgggaggctgagatgggtggattgcttgagcccaggagttcgagaccagcctaggcaacatggcaaaaccctatttctacaaaaaatacaaaaaattagctgagtgtgaaggcacggccctgtagtcccagctacttggcggggctaaggtaggaggattgcttgagccaggaaggtagaggttgtagtgtaccgaaatcacactacactccaccctgggtgatagagtgagaccctgtctcaaaaataaattaaaaaaaaattaaaggcctggcacagtggctcacgcctgtaatcccagaactttgggaggccgaggcaggtggatcacctgaggtagggagttcgagaccagcctgaccaacatggacaaacgctgtctctactaaaaatacaaaattagctgggcatgatggcacacatttgtaatcccggctactcgggaggctgaggcaggagaaccgcttgaacccgagaggcagaggttgcagtgagccgcgatcctgctattgtactccagcctgggcaacaagagtgaaactacgtctcaaataaaaaaaaaaaaaaaaagaaaaagaaaattaaaattaaaaaataaatgggcaaaaaactctgaacagataccttaccaaagaagatatacacggccgggcatggtggctcatgcctgtaatcctagcactttgggaggccgaggtgggtggatcatgaggtcaggagttcaagaccagcctggccaagatggtgaaaccccgtctctactaaaactacaaaaattagctgggtgcggtggcaggtgcctgtaatcccagctactcgggaggctgagggaggagaatcacttgaacccgggaggcagaggttgcagtgagccaagattgtgccactgtactccagcctggacgacagagcaagactctgtctcaaaaaaaaaaaaaaaaatatatatatatatatatatatacacacacatagcaagactctctcaaaaaatatatgtatatacagatggcaaataagcacataaaaaagtgcttaatgtcatatgtcattagggaattgcaaattaaaaaaatgaggtaccactactcacctattagataacagctaaatttttttttctttgttttgagacaaggtctcattctgccacccgggctggaggacagtgacgtgatcactgatcactgcagccttgacttgctgggttcaagggatcttcccacctcagccttctgaatagctgggactacaggtgcacgccaccctgcctggctaatttttaaattttttgtagagatgggagtctccctatgttgcccaggctggtctcaaactcctgggctcaagtaatccgctggcctcagcctcccaaagtgctgagattacaggcatgagccactgtgcctggcctaggatggctaaaattttttcttttcttttcttttctttcttttttttttttttttgaggcggagtctcgctctgtcgctctgtcgcccaggctggagtgcaatggtgatatctcggctcactgccacctctgtctcgcgggttcaaacgattctcctgcctcagcctcccaagtagctgggattacaggcaagtgccaccatgcctggctaatttttgtatttttagtagaaacgggttttcaccatgttggccaggatagtctcgatctcctgaactcatgatcctcccacctcagcctcccaaagtgctgaggttacaggtgtgagccaccatgcctggccgaatggctaatgactaaaatttttaaaaatgacaacaccaaatgctggtcaagatgttgagcaacaggagctctcattcattgctgtggaaatgcaaaatggcacagctacctcggaagacagtctgatagtttcttctaaaactgaaatgctcttcctacatgatccagcaattgcactccttggcatttaacccaagtgaatcggaaacttacatccacacaaacactcgcacacaaatgtttataacagatgtattcgtaattgccaaacttggaagcaaccaagctgtccttcagtaagtgaatggataaactgtggtacgtccagacagtagaatattattcagtgctggccgggcgcagtggctcatgcctataatcccagcactttgggaggccgaggctggcggatcacttgaagccagtagttcatgaccagcctggccaacatggcgaaaacccatctctattagaaaaaaaaaaaaaaaaaaatagccgggcatggtagcacacacccgtaatcccagctactcaggaggctgaggtgggagaattgcttgaacccaggaggcagaggttgccgtgaaccaagattgcaccactaaactccagcctggatgacagagcaagactctgtctcaaaaaaaaaaaaaagaatattatttagtgctaaaatgaaataagtcgccaaaacataaagaggtgtggagaaaccttgccttagtctgttttctgttactataacagaatactagagactaggtaatttataaaggagagaggtttatttagctcaagattctggaggtggggttgtctaagatctgcaggatatgggattcagcttttaaaaactgagcttctggtcgggcttgtagcttacacctataatcccactacttcaggaggctgagacaggaggatcactgaaggccaggaatttgagaccagcctggacaagatagggagacctcttctctacaaaaataaaaataaaatgggccaggtgcagtggctcacacctgtaatcccagcactttgggaggctgaggtgagcggatcacaaggtcaggagatggagaacatcttggccaatatggtgaaaccccgtctccactaaaaatacaaaaattaggccgggcatggtggctcatgcctataattccagcactttgggagcactttgggaggctcgttcaattcgagcacttgaacgcctgagatcaggagttcaagaccaacacggtaaaaccctgtctctactaaaaatacaaaaattagctggatgtggtggcacgcacctgtaatcccagctactagggaggctgaagcaggagaatcgcttgaacccgggaggcggaggttgcagtgagctccaatcatgccattgcactccatccagcctgggcaacagagtgaaactgggtctgaaaaaaaaaaaaagaattagccaggcatggtggtacgcacctatagtcccagctactctggaggctgaggcaggagaattgcttgtaactgggaggcagaggttgcagtgagctgagatttcaccactgcactccagcctgggtgacaagagtgaaactccatctcaaaataaataaaatggctgagcatggtggctcatgcctgtaatcccagcaatttgggaggccgaggcaggtggatcatttgaggtcaggagtttgagaccagcctggctaacatggtgaaaccccacctctactaaaaatacaaataaattagctgggtgttgtggcacacgcctgtaatcccagctactggggaggctgaggcaggagaatcgcttgaacctgggagacacaggttgcagtgagctgagatcacaccactgtactccagcctgggcaacagagtgagactccatctcaaaaataaataaataaataaataaaataaatacaaataaaaataaaaattaggtggacatggtggcctgcagtctcagctactggggaggctgaggagggaggatggcttgagcccaggagtttgaggctgcagtgagctgtgacagtgccactgcattccagcctgggtaacagaggaagatcctgtctgtaaaaaacaagcaggctgaccatggtggctcatgcctttaattctaacactttgggaggccaaggtgggaggattgcttgagcccacgagttcaagaccagcctgggcaacatagtgagaccccatctctaccaaaaaatttaaaaattagctggacattgtagtgcatgcctgtagtcccagctactcaggaagctgaggtgggaggattgcttgagcccaggaggtcaaggctacagtgagctgtgatcatggcactgcattccagcccaggtgaaagagtgagaccctgtctcaaaaacgaatgaatgggctgggcgcggtggctcatgcctgtaatcccaggactttggaaggccaaggcgggcagatcacgtgaggtcaggagttcaagaccatcctggccaacatggcaaaacaccatctctactaaaaatacaaaaagtagccaggtgtggtggtgcgtgcctgtaatccaagctacttgggaggctgaggcaggagaattgcttgaacctgggaggcagaggttgcagtgagccgagatcatgccactgcactccagcctgtgcaacagagcgagactccgactcaaaaaaacaaaaccaaacaaaaaaaaagaatgaacaaagaaaaattgagcttctagtgagggtcttgtgctatgtcataacatgatacagaagaggaagcagacatgtgcaaagtgaccaacacaagaagcagtctcgcttttttttttttgagatggagtttcactcttgttgcccagggtagagtgcaatggcacaacctcggctcactacaacctctacctcccaggttcaagcaattctcctgcttcctgagtagctgggattacaggcgtgcgccaccacacccggctaattttgtatttttagtagagacggggtttcaccatgttggtcaggctggtctcgaactctcaacctcaggtgatccacccgcctcggtctcccaaagttctgggattacaggcgtgagccaccatgcccagcctgcagtcttgctttataacaacctgctttggagctgatgaatccaatcccatgggatcgagaactcaagggaatgagaaagaccttaatacatcttaatgacctaatcaccccttaaaggcaccacctaccaacactacctcattgggacaaagtcacgacataaatttgagtggggacaaactgtatttaagccatagcaaacctaaaatacttattatcaaatgaaaataagccaatgtggaaagactacaaactgtatgattccaattatatgacattccggaaaaggcaaaactatggagacagtcaaaatatcagcagtttccaggggttaggaaggaggagatgtaggtggtacaccgaggatttttagggcaatgaaatcattctgtctgataccataatgtgcttacattttactatacattggtcaaaacccatagaactgcataataccaagagtgaaccctaatgtaaactatggacgttgattcataatgaggggtcatgagggttcatcaattttaacaaatataccactctggtgcaggatgttgataatcagggaggctgtgcatgtgaagagactgggtatatgggaactctccatattttttattttatttatttatttatttatttatttatttatttatttattttgtgatggagtctcactttgttgtccaggctcgagtgcagtggcatgatctctgctcactgtaacctctgcctcccaggttcaagcgattcttctgcctcagcctcccgagtggctgggattacaggtgcccaccaccatgcccagctaatttttgtatttttagtagagacggggtttcaccatgttggccaggctggtctcgaactcccaacctcaggtgatccacctgcttcaccctcccaagggctgggattacaggcgtgagccatggcacccagtctatttatttatttatttgagacaggatctcactctgtcacccagactggaggacaatggcacaatctctgttcactgcaacctccgcctcccaggctcaagcgattctcctgcctcagcctctccagtaactgggactataggcatgcatcaccacacctggctaatttttgtatttttagtaaagacggggtttcaccatgttggccaggctggtcttgaactcctgacctcaaatgatccacctgcctctgcctcccaaagtgctgagattacagatgtgagccatggcgcccagcccatattgttttttttagagacaggtcttgctctgtggcccaggctggaatacagtggtgtgatcatagcttgctgcagcctcaaactcccaagttcaagggattctcccacctcagtcacctcccaaatagctgggactgcagacatgagccaccacgctcatctaatttttctattttttagaggcagggcatccccatgttgcccaggctggtcttgaactcctggctcccaaagatccttttacctggtctccaaaagtgttgcaattataggcatgagccaccatgcacaaccagctctgtgttttgccttcaattttgctgtcactctaaaactgctgtatattatagtctatttttaaatttaattatttttatttttattttattttttttgagacggagtctcactctgttgcccaggctggagggcagtggtgcgatctcagctcactgcaagctccgcctcccgggttcacaccattctcctgcctcagcctcccgagtagccgggaccacaggtgccagccactatgcccggctaattttttgtatttttagtagagacggggtttcaccatgttagccaggatggtcttgatctcctgaccttgtgatctgcctgcctcggcctcccaaagcgctgggattacagacgtgagccaccgcgcccagcttaaattttaattttaattaattaatttattttttgagacagagttttgctcttgttgcccaggctggagtacagtggcacaagctcggctcattgcaacctctacctcctgggttcaagtgattctcctgcctcagcctcctgagtagctgggattacaggcacccacccccacgcccggctaatttatttgtacttttagtagagatggggttttgccacgttggccaggctggtctcgaactcctgacctcaggtgatccacccacctcagcctcccgaaatgctgggattataggcgtgagcccctgtgccttgcctatagtctactttttaaaaggagagggggattggccctgaatggatcaacttaggtcatatgactctctctgttctaatgaatgtggccagaggaattgagcacactggttagtcatgttcaggtgcatgctcatctctggagccaggagtggaatcagccctccaaaacacatggaggccaggtttggtggctcatgccggtaatctcaacactttgggaggctgagccaagcagactgtttgagcccaggagtttgagaccagcttgggcaacatagtaagaccctgtttctaaaaaagaaaaaataaaaataaattaattaaccaggtgtggtggcatgtgcctgtagtcccagctactcaggaagctgaggggggaggattgcttgaactgggtagttcaaggctgcagtgaactatgattgtgccactgcactcctgcctgggcggaagagctagaccctgtcttcaaaaccaaaccgaaacaaaaaaaacacacggattagggatgggagggatagaatcctagaaagaaattaaggacttgtttccagagaagaggggaacagatattcagaggttaaatcaatagatattgactctcctaggcaaagaggagaatgaaatccttgtgatcagacagcacagagtccagaggccttgttgataaaagagatggaatttgtggaaatactgagtgatccattctcatttagatgtccaattaactcccattcacgtcagctttattaatttattgaccacctaatatgtcccagactttgtgcttggagttgaagagacttttgtgaataacaactcagccaacaagtccatgaattttcaaaggctccatgtttattccgtgcacatttagaagaccttgcaaatttcaccactatgaaattaaatttcacatggcctaattagaatatccgcacccctaaattattgcaattgcagagaatcggagggttcaaaggaaagcagggcactcacgtaattcaccacaacccccaggctgctggaacacttggttaacttttgaccttggccaactccagtgaccacttgaagggaagaaagtgccatcccaggattgcccatgattactcttgggtggttagacccctaactgtgtgcgtcaatctggagatgttgttactgttcaaaagagggggacatgaaccacaaattaattggttttacataggcttttaaaaccaacaaaattaactttttaatattgttcatgaaacgaaatacaaaccctttattattttaaattttagtgtctggacacttttgaagtggttttgtccgttttttttcataaaatactgccactgctccattactgtttgtgaggaagaaagtataataacacattgttttctctgcccccgccaccaccccaccatggttcctgtttttatatatatatatgtatatatgtgtatatatatgtgtgtatattttttttttattatttttttttctgagacggagtcttgctttgtcacccaggctggagtgcagtggtgcgatcttggctcactgcaacctccacctcctgggttcaagcaattctcctgcctcagcctcccaagcagctgggactacagatgcgtgccattatgcttggctaattttttttatttttagtagagacagggttttgccatgttggccaggctggtctccaactcctggcctcaagtgatccgcccgccttggcctcccaaggtgctgggattacaggcttgagccaccatgcccggcctcttgtttctatattaaagagacatttacctaactagataaagacctgctatgccattaacttaacttttttttttttttttttttttagagacagggtctcactctgttactcaggctagaggtgagtggcacgatcacagctaacctcagccttgacctacctggcttaagtgatcctcccacctcagcctcccaagtagctgggaccataggtgcagcgtaagccaccacatcatttagcagaaacggggtcttagtatgttgcccaggctgttcttgaactcctaggctcaagccatccaaccacccaatctctcaaagtgctgggattacaggtgtgagccaccacacccatctcacaccattaactctttcagtcaatctgcattaagcatttagtatgtacttggtactatggaaagcatcaaagaaattgacactacaggttctaaaaactttccattgaggaattaagacttagtcggtctctagctgtgtgatcttaagctagttacttaatgtctctgagtttccatttcctgatctataaaataaggatgaaatattgctcttgcaaggctcttgtatatccatgtattcagcaaatatagcttgagttcctactcagtgttccacacacctttaggaagcagagattcagtagtgctgggcattggaaggagttttcagtggggatggaatccaggctgcaaagagaaagcatttgtatgtgaacgcttctggaaaattacttaaagctgggctcagtggcacacgcctgtagtcccagctgcccaggaaactggggtgggaggatctcctgagcccgggaggctcaggaggctgcagtgagccatgattgagtcactgcattccagcctgggagacagagcaagaccccgtctagaaaaataagtaagtaagtaaataaataatgacctaaaaccatcccagaagacaggaacatgagtctctgaaggcctctgtattagctatctattgctgtgtaacaaattgcttcaaaatttagcagcttaaaccaataaaacatttatctcacagtttctgtgggtcaggaatccaggagtggctttgctgggtggttctgcctcagggtatctgccctgtttacagtcatgctgttggctgggctgcagaggctggaagcctctttggggccagatgatttgtttctgagcttgttcatgtggttgtggtcagaaggtttcagtccctcatgacatggaagctggctccctcactaagtgagagagagagagaaaccaagagagaagttttaagaaagagagaggggctgggtgtggtggctcacaactgtaatcccagcactttgggaggctgaagcgagcagatcactggaggtcaagagtttgagaccaccctggccaacatggtgaaccccatctctactaaaaatacaaaaattagccaggtgtggtggtgcacgctgtaatcacagctacccaggaggctgaggcacgagaagcacttgaacctagaaggtagaggttgcagtgagccaagatggtgccactgcacttcagtctgggcaacagagtgagactccatctcaaaaaaaaaaaaaaaaaaaaagagagagagagagaaagaaccaagacagaagcagtattgtcatgatgcaccatcacttctgcctaattttacgggtcacacagaccaccctggtgcaatagaggagggcactgcacaaggtgggcacaccaggaggcaaaggatcattggatcactggagggcattttggagtctggctaacacagccccatgacttttttgtgatttctcattttattttatttatttttttgagacaggatctcactttgtcactcaggctggagtccagtagcatgatcttggctcactgcagcctcaacctaccgggctcaagtgatcctcccaccgcagccccccataagtagctgggactacaggtgcacaccgccacacttggctaaattttttgtgtgtgtatatttttagtagagacagggttttaccatgttggccaggctggtctcgaactcctgagctcaagctatctgcctgcttcggcctccccaagtgctgggatgacaggtgtgagccactgcatctggccctgttctcactttaaatattcacctttttccttctcctcctcctcttcctctcctcctcctccttcttcttccttcttcttcttctacttttctttcttcttcttcttttttatttatgtttttgaaacaggaaacagggactcgctctgtctcccaagctggaatgcagtggtgcaatcacggctccctgcagtgtcaaccttctgggctcaagcaatcctcctgcctcagctcccgagtagctaggactataggcacatgccaccacacctggctaattttaaaaaatcttttgtagagacagggtctcacatgttgcccaggctaatctcgaacccctggcctcaagcagtctttccacctcggcctcccaaagttctgggattataggcatgagccactacacctggcctaaacattcacttttatacctaattttgtacttaaattttgtatttgttttaaagaaggctcccccaaattgtctaagcttcaggtaccacaaaacctggatccatccctggtcctaagacaggtcttcagttttttgtgacagtgggtgttagagattttgtacaaaagttcagaagctggactcagcccagcgaaaaggtttgttgatctgcctgggggaaggtgtggatttcagcccatccctgtatgccttcactcaatactcctttgaaagcataagctgctggaattaaaccagtggttttgatgtgcttggagctgaagataaagtcctgtttgcacactgtaatggtgtatttaaacattttgacaattatcaggtgaaatctttggctgttattgactccgctcctctgtaagtgattgtgtgcggcaggagagtctctccaccacatgactgggccctcacttacaggttaattgacttgtttggtcgctttcttcttaagccacaggagtggtgaaatgcaatttttttcttgtgttctttcgtaacacaccaagacaaacaaagctgagttttaaatcctgttgcatttattaacttttgagggtctagctatgagttttcagaaacaacaaccaaccaccagctcttctgatcttggtttgaatctctatgatctgagataaattaggttccccccaaaaaaacacacccccaccccaagttggacactgaatgatgtattgggaatttgtttgatacaataaatgtccactatttatttatttattttttgagatggggtgtctgtcacccaggctggagggcagtggtgtgatctcaactcactgcaacctccacttcccagtctcaagtgatcctcccaccttagcctcccgagtagctggggctacaggcctgtaccaccatgcctgactaattttttgtagaggcggggtttcaccatgttgctcaggctgtcttcaactcctggattcaagggatctccccccaacccctgagatggcatcttgttctgtcacccaggctggagtgcagtggcaccatctcagctccctgcaacctccgcctcccaggttcaagtgactttcctgcctcagcctcccaaggagccgagataacaggcatgcagcatcatgcctggctaatttttgtatttttattagagacgagctttcaccttgttagccaggctggtcttaaactcctgacctcaagtgatctgcctgcctcgacctgccaaagtgctgggattacaggcctggactcaagggatctgcccatctcagcctccaaaagtgctgggattcctggcgtcagccgctgggcctggcctattatttcttatgagtctttgggtggttgcatggcccttctgttggtctcacctgggtttgctcatgaagctgcacgtggctgaaggctcagccgggacagccaggtggctaagtctctctcattctgtgggttttctttcagagtttcttctggtgtggtggtcttggggcagagttccaaaagagtgaaaatggaagctgcaaagtttttcaaggtataagctctagacgtgtgcagcgtctcttctgccccactatgtggttaatgtaggtcccaagaagctccacgtgggtttaaatcatgttggtcttttcagggctgtatcctcagtatctagaatagagcctggtacatagaatatttattgatgcaactgagattatcatagtgtatttttctgtgagcacagcagcttattcacagcagcagtttcctaaatggtggctattttattatagctttcctaggggagacacataatgtaaattttctgttatttcttttcttttttttttttttgagacagagtctcgcttagtcccccaggctggagtgcagtggtgcgatctcagctcactgcaacctccgcctcccaggttccagtgattctcctgcctcagcctcccgagtagctgggactgcaggcaccggccaccacacccagctaatttttgtatttttagtaaagatgagggtttcactatgttgaccaggctggtctccaactcctgacctcaagtaatccacccgcctcagcctccgaaaatgctggggttacaggtgtgagccactgcgcccggcctcagttatctgctatttctaggaatactttaggttggcacagaatgaacactgatcttaactgctttccccaaccttcccccaattcgctgttatctgatactcagtaaactgccagagatgcattaccaaaataatatggaggtggtcaaaatcatcatgaagaatgtagacatggaatctgtttgcctgcgttcaaatcccggccccacctcttactcgctgtgagaccttggatgagtcatttaaacgctctatgcttttgtttcctcatctgtaaaataggcttaataattgtacgtatttcctgagattgataaaaattaaatgggttaatatttgtcaagtgctaacaagagaggttggcatgcagtcactgttatgtaagagttaactatcattataagtaacgcacaggccctgactttgagtttccaatgagtcactttcttcagataccacaaaaacttttgggagatattgttctctgcctcatctgacagtcttctgggaattaggaagccatcaagatgaactctgagcaagagtgaaagcagttcatgactggatagctttaattcacctgcttctaatttcatccatggtgtatagattgttaactgtggttttctatcaatagatatgaattagaatgccttttatggagaagtcagctttacagacttaaatagaaaaataaggctggatgtggcggctcaggcctgtaatcccagcattttgggaggccgaggtgggtggatcatttgaggtcaggagttccagaccagtctgaccaacatagtgaaacacatctctactaaaaacacaaaaattagccaggtgtggtggcacgtgcctgtaatcccagctacttgggaggctgaggcaggagaattgtttgaacctgggagacagaggtggcagtgagccaagatcatgccactgcactccagcctgggtgacagagcaagactctgtctcaaaaaaaaaaaaaaaaaaaaaaaaagaaagaaagaaagaaaaaggaaaaattatagcaggagctttcctttattgattattattatttcattatgaaaaaatctaacatacaaaaggagagaaaatagtatcatcatctcccttgtccattatctggtttctacaattatcagctcaagtgggcacagtggctcatatctgcaatcccactgctttggtaggttgaggcaggaggataatttgagcccaggggttaaagaccagcctgggcaacatggcaagaccctgtctctacaaaaaatttaaaaattatctgggtgggccaggcacggtggctcacgcctgtaatcacagcactttaggaggtcgagacagctggattacttgagctcaggagtttgagaccagcctgggcaacatagtaaaaccccatctctaccaaagatacaaaaattagccaggtgtggtcgcacacgtctgtggtcctagctacttgggaggctgaggcaggaggatcacttgagcctgggaggcagaggttgcagtgagccaagattgcgccactgcactccaacctgggtgcacaccatccaaaaaaaaaaaaaaatcagctgggcatggtggcacacacctgtagtctcagctactcaggaggctgaagcaggatggggatcacttgagcccagaagttggaagctgcaatgagctatgatcccaccactgcattccagcctgggcaacaaagcaagatcccgtctctaaaagaaaaataaaaacataaaaaagatattgacaattagcaatttaggggcaatcctgcttcatctttccctccactcttgttcctgctgcttggattactttgatgcaaatctcagctatcacaccactctgtggatacttccgtgtgtatctctaaaaaataaagactcgactttggtcataatcacaattctaatatcatacattttaaaagttaacaatggccgggcgcggtggctcaagcctgtaatcccagtgctttgggagcccaaggtcggcgtcaggagctggatgtggtggtgtgtgcctgtaatcccagctactcaggaggcggaggcaggagaattgcttgacccgggaggcagaggttgcagtgagctgagattgtgccactgcactccagcctgggctacagagcaagactctgtctcaaaaaaaaaaaaaaaaaattaacaataattcctaatgtcatcaaatatgcaggtacttgatatattcaaatttcccagctgagagcatttctttgctgaactctttgtaccctgtaacattgggactcactccctgacgtccagcgattggatgctgtgtcagagaacacaaggaacagtagagcctgtgtttacctttatttatcaatgcaatttttcaacaatttatgagaacagttgccagaaaattatgcggcacatagacagtgttatagttaatctactggctaagggatgcccaggtagctggtaaaacatttccaggagggtgtttccagaagggattagcatttgaaacaatagactgagtaaagaagaaccttgctcgccagcatgcatggacatcacccaatccttgagggtctgaattgaagaaaaaggcagagggaggatgaattctctctctgtttcagctgagacatccaccttctcctgccattggacatctcgggccttctgacttggaccaggacagatgctgttggctcccttggtcctcaggctttcagattcgtactggaaccgcatcaccagctttctcgggcctccagcttgcagatggcagatagtgggacttctccgcctccataatcctatgaatcaatccctgtaataaatctcttcctgttcataactatctatctatttatctgtctatctatctatctatctacctacctacctacctattatctgtctacctatcgctgatttttttttttgagatggagtctcactctattgctcaggctggagtgcagtggtgtgatcttgcctcactgcaacctctgccttctgggttcaagcgattctcctgcctcagcctcccaagtagctgggactacaggcatgtgccaccacgcccagctaatttttgtatttttagtagacatgaggtttcaccatgttgcccaggctgttttcgaattcctgacctcaggtgatccgcccatctcagcctcccaaagtggtgggattacgggcattacctatcatctatttatctctttattatctatctatctatctatctatctatctatctatcatctggtatctatcacctatctcatctatgatctatcaatctattatctatcatctatctattaatctattatctatcaatctatcacctatcaatctatttctattatttatctattataaatcaatctattgctctatctgcctatcatctatttatcatctatctacctatcatctatttatgtacctatctacctatcatctatttatcatctattatctatcacttatctatcatctatcaatctacacttgattttagccaaaaggccaagaggcgatctatctatcatctatcaatctattatctatcatctattaatataattatctatctatctatctatctatctatctatctatctatctatcctactggttctatttccctggagaaccctgactaacacaggcggtaagtaagttgtagtggtaactgggtttgagtctgcctcctccactcctcaaccacttgaatctctctatgccctgccttagccacctatgaaatgggaataattacagcaaggccaactcttcttcttttttggagacggagtctcactctttcacccagcctggagtgcagtggtgcgatttcagctcactgcaacctccgcctcctgggttcaagtaattctcctgcctcagcctccggagtagccggctaatttttttgtatttttagtagagacggggtttcaccttgttgcccaggctgatttcaaactcctgagctcaggctaaccgcctgtcttggccaagtcttcttaatgtctgttcagcatctcttctccctgtcttccttttgtcactggaacccccccataggatgccctaacacacagattttggtatgagtgtgttcggccccatctaactgaggatgcatcggagaggtcagatgtgcacattcactgtgaagggacagccttgaacgtggacccacacaggggtgattactggtgatgaaaactcccttgagttttactgagttgcattgccagaagtgacatgattgtctaaagtagtgaacaagttttggtaatgttccaaacaaaagaaagtacaggcttcctttaatttatacagaagtgacctttgtggaaaattcaataatattgtcttaagtctgttttttgttgcttataacagaaataacataatacataaaacttggtaatttataaataaaaggaattattacttttttaatttttaatttatgtgggtacatagtaggtacatatatgaggaattatttcttacaattatggaggctaagtcccaggctcgaggggctgcatctgatgagtgccttcttgctgttggggactctttgcagagacccaaagaagcacagggcatcccatgaagaggggcctgagcagctacctgaggtctctcttcttcttcttctaaagccacaagtcccactctatgacaactcattaatccatttacccattaactcattaatctattaattcatgaatggatgaatccattcatgagagctttcatgacccaatcacttctgttttttgtttttctgttttttttttttttctttttgagacagagtcttactctgtcacccaggctggagtgtagtggcacgatctcggttcactgcaacctccggcctccttggttcaagcaattcttctgactcagcctccccagtagctgggattacaggcatgcatcatcatacctggctaatttttgtatttttagtagagatgagggtttcaccatgttggccaggctggtcttgaactgacctcaggtgatctgcccgcctcggcctcctaaagtgctgggattacaggtatgagccactgggccaagcccaatcacttcttaaaggctgaacctctcagtactgccacattgggtattaagtttcaacatgaattttcaaggggacagtcaaaccatagcagatagaagtgtgcaaaaaaacgcaatcagaccaggtgcgatggctcacgtctataatcccagcactttgggaggctggtgggtggataacctgaggtcatgagttcaagaccaacctggacaacacggcaaaaccccgtctctactaaaaatacaaaaactagccaggtgtggtggcgcctgcctgtagtcccagctactcaggaggcagaggcgggagaatcacttgaaccaggaggcggagtttgcagttagctgaaatcatgccactgcctgggcgacacagcgagactgtcacaaaaaacaaagaaacaaacaaacaaatgccttttttaggaatgaggaagacacagagagttcatacatgtgcccaaggccacattaagctcctaactgctataaactagctgcctaaatagaaagaatgttctagaaggacagagcagaaaggctcagagtggttacctctgaagaagggtgaaggaaagggtacaaggagaaggctgggtgtggtggatcatgctcataatcctagcaccttgggaggctgaggcaggcagatcgcttgaggccaggagtttgagaccatcctgggcaacacagcaagactctctaaaaaataaataaatgctagccaggcgtggtggcgcatgcctgtaatcccagctactcaggaggctgagtcaggagaattgcttgaacccaggaggcggaggttgcagtgagccgagattgcaccattgcactcccgcctaggcaacaagagcgaaactccgtctcaaaaaataaaaaataaaaataaataaataaataaatacaacttaaaaataatataggttaactataatacctaataaagtttgacatttacctactgctgacccagtaattccactcttggattaagagaaatgtgtgcccatgtccataaaaatacttgttccaggccaggtgtggtggctcatgcctgtaatcctagcactttgggaggctgaggagggcggatcacctgaggaaaaaaattagctgggcgtggtggtgcgcgcctgtagtcccagctactcaggaggctgaggtaagagaatcgcttgaacccaggaggtggaggttgcagtgagctgagatcttgccattgcactccagcctgggcaacagggcaagattccatctcaaaaaaaaagaaaaaaaaatttgttccagaatgttcatagaagcttgtttcataatagtccaaactggaaacaaccaagtgcccgacaacaagagggtaaacaaatgatggtatggtcccaaaatggaattctactcaacaacagccaggaaagaattactggggcatccagcgtgactcaatctgaaaagcattatttgagtgaaagaagccagatacatgagttcatgccggatgcagtggctcacgcctgtcatcccagcactttgggaagctgaggcaggtggatcatttgaggtcaggggtttgagaccagcctggccaacatggtgagaccatgttcctacaaaaaataaaaaaattagccaggcgtggtggcggacacctgtaatcccagctacttgggaggctgaggcaggagaatcccttgaacaagggaggcggaggttgcagtgagccaagatcatgcctctgcactccagcctgggtgacagagcgagactctgtttcaaaaaagaaaaaaaagagttcattctgtatgattccatttatgtggagtctaagaatagagaaaactaagggtgataaaggtcaggatagtggttatcttgttttgggaaggggcaagagggaactttctgggggatggaaatgttctgtgtcctaggggatgtttggcactgtctggagaggtttttgattgtcacaactggtggtgggggtgctactggcatttagtgggtagaggccagagatgctgctaaactgaatcttacaatgcacaggattaccccaaaacaattatctggccggaaatgtcaatcgggctgagagtgagaaattttggtatatgatttaaattgcttaaacacgatcaaggcatttctgcatccttgtgggcatttgccattactacaggcaatatttgagtgacggagacggctagttatccttaggatatagagttgtcattggaaagcagccagggacaatatttcccaatcccctttgcatctgggtacagcctgtgattcattctgcaaatagaatgtgagcaaaagcaatgtgtattagctctgcacaaagcagttgagaaacatgtgcgccttttccattctccttcccctgccaccactggatgcagacatcaacgatgaggccccagggatggaggaaagctgtcagtcaactggcaatgcagcgctagaggagataaacttctattatgcaagcctctgaaatgtgagcgttatttgttacagtggctagcgttactctaatagagtattcaacaaaaaaaatatagtctttgaagggcaggtctcccaaactgatatattaaggggcagttaatctcacttgtaaattctctgagagcagggatcatgtgctacacattttcttaatcttcgataatgctaagtaccatgttgagcaaatgacatgtttctttctctctccttccacccccgcccccaaagtcctatgacttcctgggttggaagagaatgtaagtgttcttttgtaatctttccaggacaccattaatggaaccacagaacaccaactttcacactctaattccatgtgttttggaataagatttactttgccccatgctccagagttgggtcctgattggcttacatcaatcaaagtcttttctttaccctggccttcccactctgtcacccaggttggagtggcacaatctcggctcactgcaacctctgcctcctaggttcaagtgattctcctgcttcagcctcctgagtagctgggattacaggcacatgccaccacgccaggctaattttttgtatttttttagtagagacaggctttcaccatgttggtcaggctggtctcaaactcctgacctcagttgatccgcccgccttggcctcccaaagtgctgggactataggcgtgagccaccacgcccggcctccctggtcttcttgttagggttcgcagatgaacacatcactgagtgagaggcaatgagatccaaggttttatctgggactccggaagggaagcagtttcttccctttcaagagaaagccctgagcatatgcttttctcctgtgtggtggtgtcggtttgggaggcttcagttactacagtaactttgccaccaagagagcaactctttcaagttgtcaaggatccataggtatagatagttctcaggggctcaaatattgtcagaacctaaattctttctctgcctctcttagtgtgttagatattctcactcgtgatgccacgataatgcccacaatttcagacattcaagtcataacaacacgtttctgttaatgagaaaaacctttcccagcgtgcagcggagtttttttcttgtcttattggctagagggcatcacgtgataagcctaaaccaaccactgacaagtggtctggatcaccgtgattggttcatatgtattcctcaggctggggttgggactgggatccatctccctggaagcacatggccagcaggagaggggtggacatctggtcccaaccagaattctcatttaaaaaggaagaaaagtttttgagtaggccaacaataatgtctgctatgtatcctgccatttgtggtggtatatttatcagtcaattgcaagtaacaaaaaaccaaaaagaaaaaagatgttagggagaaatgtattggctggcacaactcaaaagttcagagtttcccagcttcaggcatggctggatctgagcaacaaggtcataattatttggtctctgtttttattgctcatctccgctttattctcaggcagaatcttaccgagtggtggctccagcaactacagacttacttcctaccaagttagcaattccagaggaatcttttaggcaactgttgcaacaaaagtttaagaactgagcctcaaagacttggcttggatcacaaccccattcttgaaccaatcactgtacccagaaggaatgaaaaattctaactggtcaaaccatttcttttttttttttttttttttttttttgagataggtcttttgctctgttgcccaggctggaatacatagctcactgtggcctcaaactctgggttcaagtgatcctcccacctcagcttcccaagtagctgagattagtggtgtgcaccaccacgtctaactaattttttaaattttttgtagaaacagggcctttctatgttggaagagggtcaggcgggcgacttgagaaatcaagcgctctgttttacctgtgatttgtgtttcatatgctgacatacttccggggtcttgagttccttctcccgtgatttttcactggggatgggctgtctgcacgtgcaatgtgtttattggagttgtgtacgtgctcacttgaggcattcttcccttaccagttgaatgtccctagacggtcatcagttaaactttgccattttgcctcttaattcccatgcttgagcccatttacccagtcctgagatcttactgggaagctgctgatcaccagtttcaggttgttgttttttttctgcttattgggagactgcctttccctggagtcggctgagaccaatcattattttagagagatagttaacaaccgcctgagcatcacctgatggtcacctctggtcacctgacattcctggtgtgtgtgtgttgtgggggaactctctcttgctctgttcatgtctgactagctacctactgtaacagctgcaccactgcattccagcctgggtgacagagcgagacgctgtctcaaaaaaaaaaaaaggtgatttgtggcgatggcaaaaatctcaaaggcgttacatgagtcactgaaatttggggaactctgatagacccaggttctatcctggactttatttggctgaaccaaactgaacaaaaattcccttgcatgaaaactggtgctggaggaatattttctttgattgattgattgaggcagggtctcactgtcacccaggctggcattgagtgatggaatcacggctcactgcagcctcaacttcccggcctcaggtgatcctcctgcctcagcctctcaagtagctgggaccatgggcgcacacccagctacccagctaattgatttttgtggggttttttttttttttttgagatggagtctcactctgtcacccaggctagagtgcaatggctcggtctcggctcactgcaacctccgcctcccaagttcaagcaattctcctgcctcagcctcccaaatagctgggactacaggcacgtgccaccacacccagctaatgtttgtatttttagtagagatggggtttcactatgttggccaggctggtctcaaactcctgaccttgtgatctgcccacctcagcctcccaaagtgctgggattacaggtgtgagccactgcgtctggcctatttttgtgcattttttgtagagccaggattttgccatgttgcccaggctggtcttgaacttctgggctcaaatgatcctcccgccttggcctcccaaagtgctggggttacaggtatgagccaccatgtccagcttgaggaaatctttccaaggactgctgccttcaggtggagcttcaaggttcaaacggtctttattcatagcctttttaaatttggtgggggctacatttttcaaatatattttcaaaggccttcatttggggagaggccttaaatgtgccaactgccagctgcaagaaccaagtggccagaacatcgaggttttgaagtctcgcaaaacagatgtgtaaaagtcaactgcacaggcaggaccttagagtggcacccggaacccaaggccttgaaagatcccagcttgtttctttacagaaagcttggctttgttgaccaggctgatagaaaccgcgcccagctgtagaaaggttgcgtgtgtatatatgtgcgtgtttctgcttcctctttttttatctcatacgattacaaacacataatctcaagggtctgcagcacatgtcaccttggagttattttagatttacccccggaacatcaaacgttcattccagaagggtttgacagggcatagagagtgccgactaaacccagagggggcaagttcaagcatgtttttcgctaccccaatttgcatcagtgcctccccacccccccaaaacacatgcctcttttgcattactcagtgaaaagtgaaaactgataaagaaaaggcatgttttgttaattaaaaacatctttatttaatagcatggctgctaaatctggtaaatagcagcatgctgctagatctgaataatggggtcgtttttttctttgacacagggtctcactctgtcactcaaactggagtgcagtggtgcagtcatggctcactgcagcctggaactcctgggctcaagtgatcctcctgcctcagcctcctgagtagctgagactacaggcacgtgcaagcatgcccaggtaatggggtcatttttgtttctttttctttcttcttatttcaaccctattatctgacctttttttttcccttgcaaatattcttgttctgtctcctatgtctggagatggaagataaggaaacccatactagtccttttgggttgctctgatcaaataacagagcaacagacagagaaaacaacagagggagggagggctttccctctttccccctccctccctccctccctccctcccttccttccttccttccttccttccttcctttttttccttcttttctttcttttctttctttttttaagacggagtctcgctctgtcgccaggctggagtgcagtggcgtgatctcagctcactgcaacctccgcccctgccccagggttcaagtgattctcctgcctcagcctcccaagcagctgggactacaggcgtgcgccaccatgcccagctaatttttgtatttttgtattttttgtatattttgtattttgtagagacggggtttcaccacgttggccaggatggtcttgatctctacctcgtgatctgcccgcctcggcctcccaaagtgctgggattataggcatgagccaccatgcccggtcttcttttctttctttctcaattttattaagtgcatcctatggtactatgctgggcataatggaaaccaaaacagaaataatgtctactcagatggagtttaatttctggacaggagtaacaaactgaaatgcataacaggaacctaagatgcactgaatagagctggcttgagaaagataacctgtaatcttcactggcctcagtgtctggaaggcatcagggaatagtgggtaccgtggtaaactggagagcccatgctcctttccagatcctcagatcagccatcaggaaagtagaccctcttttcccatacttttatatacatatttcaaaagaagccagaaattgacagaaattcagatctttatgtgaaatctaccagtattcaaatactgacaactcattcagattatttaaaatgcttgtatgggccgggcgcagtggctaacgcttataatcccagcactttgggaggccgaggtgggcggatcacaaggtcaggagatcaagaccatcctggctaacacggtgaaaccccgtctccactaaaaatacaaaaaattagccgggtatggtagcaggtgcctgtagtcccagctacccggggaggctgaggcaggagaatcgcttgaacccgggaggtggagcttgtagtgcagtgagctgagatcgcgccactgcactccagcctggacaacagagcgagactccatttcagacagacaaacaaacaaaacgcatgtatgggccaggtgtggtggctcacgcctgtaatcccagcactttgggaggccaaggcaggtagatcatgaggtcaggagatcgagaccatcctggctaacatggtgaaaccccatctctactaaaaatacaaaaaattagcctggcatggtggcaggcacctgtagtcccagctactagggacgctgaggcaggagaatggtgtgaacccaggaggcagagcttgcagtgagccaagatcatgtcactgcattccagcctgggcgacagagcgagactccgtctcaaaaaagaaaaaacaacaaccaccttaggttctataggtgatgttatctatagaagcaattgggaaagttacaaatcttgtgacctctggccacatgactcccgagcagtaaaggattatagaaactgtgcctattttatcagaattcagtcccctctcatcctgctaaccttgtggcctttcattagttttacaaagctggtttggttttggggagggctattattatctttgctttaagataaaaccataaactaaattcctcccaaagttagcttggcctatgcccaggaatgaccaaggagtttggaggtcagaagcaagatggagtcaactatgtaaaatttatcttactgtcataatttggcagaggcagtttcaaggtcagcagtgaatggtagccgcagtgtgctatcattgcacctgtgaaaagccactgtaatccagcctggacaacatagcaaggccctgtcttttaaaaaatctattttaaaaaaggctgggcaaggtggctcatgcctgtaatcccaacactttgggagcctgaggtgggcagatcacctgaggtcaggagttccagaccagcctggccaacatggcgaaaccctgtctttgccaaaaatacaaaaattagctggacatgatggcgcatgcctgtaatcccatctactcaggaggctgaggcaggagaactgcttgaacccaggaggcagaggttgcagtgagctgagattgcaccactgcattccagcctgggcgacaaagggggactccatctcaaaaaaaaaaaaagtgtataatcaggcatccaactcaacccgattgactaggactttcctgattttaacactgcaaacctggaaagtcctggacaaaccagaaggagccggtcatcctacttatatggtactcagcatttgccaggcatgaagtccgtgatcagggactgctaacaggcggcgggccaactcacaggccaaatccagccccaccactagttttcttttttttttgaattgaaaaaattttggaccaagcatggtggcttacacctgtaatccccacacttgggaggctgagatgggaggattgcttgaggctgggagtttgagaccagcctgggcaactcagggagatcctatctctacaaattaaaatgagaagtaaataattttgataattgcagattcacacgcacttgtaaaaaataatacagagatctcttttacattttgtccattttcctccaactatgcaaaagcatagtataatatcacattcgggatgttgatattcatatgacccaccaatcttattcagatttctcttatttgtagagatggggttttgccatgttggctaggctggtcttgaactcctggcctcaggtgatctgcccatctcagcctcccaaagtgctgggattacaggcatgagccacctcaccggaccagatttccctttttagctgtactcatttgtgtgtgtattaagttctataaaattttatcacgtcttgtgtgtccaccaccgcagtccagatactgaacagtttcaagaccacagggaccctcattgtgcctttgtataacctcacccacacctctgtcccacagactgcactcccagccctcatccttaaccccctggcaactgctaatctgtcctccagttctaaaatgtcatttcaaaaatgttacaagctggatgtggtggcttacgcctgtaatcccagcactttgggaggccgaggtgggcggatcacctgaggtcaggagtttgagaccagcctggtcaacatggtgaaaccccgtctctactgaaattagccgggtgtggtggcaggtacctgcaatcccagctactcgggaggctgatgcaggagaatcacttgaacctgggaggcagaagttgcagtgggctgagatcacaccactgcactccagcctgggcaacagagcaagactctgtgcccctgcccccctgctccccacacaaaaagttacacaactggaaccatacccaatccccatacagtatgtaattttaggggattttatttccccctcagcataattttctggagattctttctaaccgtcgcacgaaccaacaattcatttctctttattgctgagtagtattccatgatacagatgtaccagtttaactatttacttgttgaagcatatctgggctgataccagtctttggttctgcctcctgtttttatataaagttgtattggaacacagccatgcccatttatttacattttgtctatgactgctccttagagttgaatagtttcatcacagaccatagagcccacagcctaaaatatttactctccagccctttgtagaaaaagtttgccaacccttattccaagcacctaacatttattaatcttaattttcacaatatccctatataattgttatcttcgtttcgcaaagggagaaactgaagcataaagaaagtaagtaatttgctcatagtcacacagccgagctaggttttgaactcagcaatatggctctaggggctgcctcttaaccagtcctcctcaaaagataatcttacttctcagttcaagacagaggaactcggctgggcgcagtggctcacacctgtaatcccaacactttgggaggccaaggtgggcagatcacctaaagtcaagagttccagaccagcctggccaacatagtgaaactctgtctctactaaaaatacgaaaattagctgggcttggtggcaggctcctgtaatcccagctactcgggaggctgaggcaggagaatcgcttgaacctgggaggcagaggttgcagtgagctgagatcacaccattgcactccagcctgggcgacaagagtgagactctgtctcaaaaaaaaaaaaaacaaaaaaccacacacacacacacacaaacagaggaactgaaaactgagataagcacacaagagagctagcagctgaacaacagggcttctctttgagggctagaaggaacggtaggatttaacttgtgatcatttgctttgttacctgaataatgcttggaacagagctaaaatttctcattcatttgaattaatttgatatagggctttttaaattttaccaggattttacaaaggttcaggacccaagtgtctctggtcccctgactttcttcctttctttctttttcagacagagtttcgctcttgtcacccaggctggagttcagtgacacgatctcggctcactgcaacctccgccccccgggttcaagccattctcctgcctcagccttccgagtagctgggattacaggcgcccaccaccgtgcccggctaatttttgtatttttagtagagatggggtttcaccatcttggccaggctggtcttgaactcctgacctcatgatccacccacttcagcctcccaaagtgctgggattacaggcttgagccaccacatctggtcagtcccctgactttcacagccacatttgtaactggaaaattagcacagtcattgttatcttttgcttgtatcccaggggtttttcaggtaagtacagacctgaacctagagaaacttccctaggccagcatgaggctaaatggtggcttttaatggaaatacttttctttcttcttcttttttttttttttgagagggagtcttgcactgtcgcccaggctggagtgcagtggcatgatcttggctcactgcaagctctgcctcccaggttcacgccattctcctgcctcagcctcccgagtagctgggactacaggtgcccgccaccatgcccgactaattttttgtatttttagtagagacggggtttcaccgtgttagccaggatggtcttgatctcctgaccttgtgatccgcccacctcgccctcccaaagtgctgagattacaggcgtgagccaccgcatctggccgcctttcttcatttttgtggggagacttatgcccagctgagagaatttgggtctccctttagggtgaccaactatcatgattttcctgggattgagggggtttctggattgtaggacttgcagtgctaaaacctctgcctcctgggcccaagtgattctcctgcctcagcctcccaagtagctgggattacaggcacatgccaccacgcccggctaattttgtatttttagtaaagacggggtttcaccatgttggtcaggctggtctcaaactcctgacctcaggtgatccacccaccttggcctcccaaagtgctgggattacaggtgtgagccaccacatccagcttgtaacatttttgaaatgacaacattttagaactgaaggacagattagcggttgccagggggttaaggatgagggctgggagtgcagtctgtgggagagaggtatggtggctcatggctgtaatcccagaactttgggattacaggtgggtggatcacctgaggtcaggagttcgagaccagcctggccaaaatggtgaaaccccgtctctactaaaaatacaaaaattagccaggcgggtgtggtggtgcacacttgtaatcccagtactttgggaggctgaggtgggtagatcacttgaggtcaggagttcgagaccagcctggccatcatggtgaaaccccatgtctattaaaaatacaaaaattagccaggcttgatggcgcatttcagtaatcccagctatttgagaggctgaagcaggagaatcgcttgaacccaggaggcagaggttgcagcgaactgagatcactccactgcaccccagcctgggtgacagagtgatactctgtctcaaaaaaaataaataaaattagctgggtgtcatggcacatgcctgtaatcccagctactcactaggctgaggcaagagaatcagctgaactcaggaggcagaggttgcagtgagctgagatcacaccactgcactctagcctgggcaacagagtgagactctgttgggcaaacggagagaaatcagtcaccctagtccaactagtccctgacccagacttggaaggagagggtagatttcaaaagacaaagatatattcattcattttttgagataaggtctcactctgttacccagacaagagtgcagtggtgcaatcatagctcaccgcagccttgaacttctcaagggatactcttgcctcagtctcccaagtagtcaggattcaggtgtgcaccaccccacccagccacaaaacaaagaccaaaaaaagcaacatttcagccctgggtagtggctcatgcctgtaatccagtgctttggaaggccaaggtgggtgggtcgcctgaggtcaggagttcaagaccagcctggccaacatggcgaaaccttgtctctaccaaaaaatagataaaaattagccaggtgtggtggtacttgcctgtaatcccagctactcgggagattgcggcaggagaattgcttgaaccagagaggcagaggctgcagtgagccaagattgcgccgctgtactccagcctgagagagagcatgagactccatctcaaaaaaaaaaaaaaaaaaaaaagaaagtaaaggaatgaaagaatggctacttcataggcacagcagtagcatgggctgctgattggctatttttatggttatttctttctccagcctgggcgacagatcaacactctgtctcaaaaaggaaaaaaagaaaaaaaaagttaccttgccacatattgaaatggccccaggagcctcctcctttctccccctcccctcaacccattacgaaaaaaaaaaaaaacggccctacaaaggcttcttttgtgggggaaaatttgcattgtaaagaatttctatgaatataactagatttttcatcttccaggctctccaaatcctggtgagattaactgagaatctagcatcctgtaaaggtctaaatagaaaacattaaaaaaaaattatagagatggggtctcactctgttgccctggctggtcttgaagtcctgggctcaagtgatcctcttgccttggcctcccgaagtgctaggactacaggcatgagttaccatgcccgcccaacaaataggaaacatttgtcctctattgtctcaaagggcagccacctatgagacttcatctacttcatacaaaccttggtctccatagccccttattgtaacccagacactcctttcttttgattctagatctctagatagtaacttaactttcagccaattgccaatcagaaaatctttgaaaccacttgttacctgtaaataccctcgcttactttgagttggtccacctttctggactgaaccgatacacctcacatgtattcattgatatcttatgtcctcctaaaatgtataaaaccaacctcaaagggcgggtgcggtggtttatgcctgtaatcccagtactctgggaggcggaggtagacagatcacctgaggtcaggagtttgagaccagcctggccaacatggtgaaaccctgtctctacaaaaaataaaaaattaggccaggcgcagtggctcacacctgtaataccagcactttgggaggccaaggtgggtggattgcctgaggtcaggagtttgagaccagcctgaccaatattgtgaaatcctgtctctactaaaaatacaaaacttagccgggcatggtggcgtgcacgtgtagtcccagctactcgggaggctaaggcagaagaattgcttgaacccaggaggcagaggttacaatgagccgagatcgcaccactgcactccagcctggatgacagagggacactctgtctcaaaataaaaaaataaaataataataaaattaattaattaaaaaattagctgggtgtggtagtgcacacctgcagtctcagctactccagaggctgagacgggaggattgcttgagcccgggaggtggaggttgcagtgagctgagattatgctactgctctccagcctggatgacagagcaagaccctgccccccacccatccccccaaaaaaagtcttctgctagccatcatcactcatatttggctcagaataaacctctttaaatattttgcagttcagctttttcaacacctccaatttgaacttgtctgattgtatccacaggtttagattcaggttgaatatttttggcaaaaatactataaaagtgatattgtgtgtgtccttcttggggaatgatttttattatactacgttttaataaatttacttttagccgggcatggtggctcacgcctgtatcccagcactttgggaggccgaggcaggtggatcacctgaggtcagttgttccagaccagcctgggcaacatggtgaaaccccatctctactaaaaatacaaaaaattagccaggtgcggtggtcggtgcctgtaataccagctacttgggaggctgaggcaggagaatcgcttgaactggggaggcagaggttgcggtgagctgagatcacgccattgcactgcagcctgggcagcaagagtgaaactccatctccaaaaaatatatattttttatttatttacttttcatttatttaagaggggtataacatcacatggaatctttgtccagtggccttagcaggaagattgtttcagaatttggcatgaactatgcccataattccatgggtctgagttacctttcctcacatcactctggttttgttcagtttgctgccgggagtcactgtcctgttctttgctttgtatgcataagcgcatctcttgcccaaataggattcagtttcatctcaggcataaatgccttcaatgttaagaagagctgtgtactccctttggttcaagagaccctgcttatagccagcaaaagtggccttgggtccaggcccagtggttcatgcttgtaatctcagcactttgggaggcctaggcaggaggatcacccgaggccagtaattcaagaccaggctggtcaacatagtgagaccgtgtctctacaataaaaagaaaataaagccaagtgcagtggctcacgcctgtaatcccagcactttgggaggccgaggcgggtgtatcacctgaggtcaggagtttgagaccagcctgaccaacatagtgaaaccccgtctctactaaaaatacaaaattagctgggtgtggtgtcacatgtctgtaatcccagctactcgggaggctgaggcaggagactcacttgaacacaggaggcggaggttgcagtaagccgagattgtgccattgcactccagcctgggtgacagagtgaaagtccgtgtcaaaaaaaaaaaaaaagaaaaaaaagtaaaaggaaaaaaggaaaaatggccttagaccacagccttccagacatatctgccttttagaagtcctgtcctggttgggcagggtgtctcatgtcagtgatcccagcactttgataggccaaggcgagaagatcccttgagcctaggatttagagaccagcctgggtctctaaatataacataaggagatcccatctctacaaaacactaaaaaaagttagctaggtgtggtggcatgcacctgtgttctcagctactgaggaggctgaggttagaggatcacttgatcctgggatgctctaggttacagtgagctatgatcgcaccactgcactccagcccgtgcgatggagtgagaccttgtttcaaaagaaaaaaaaaaaaggccctgtcaagcagacaggctccaagatggtagaaagagaaaggccttagggaatgatttttaaatttacggcagctgagagtctaacttcttagagggggaaaattgtgaaatactaaaatgtgaaggtgaaatcccttgcccaaggtcatatgtgccttttagttggtgaccccagactctaatcctggtctccttgtctgtctgtacctatgtgttcttctgtcttctctgttcttagaaacaaactttttcctccccccacctacagcatgccttctgtggtcagaattctgctttaaaaagcctttttcccttattacttttgcacacaactcagttctctccaacaaggcctgaactgccattgtttgcttcaaacttccttgcatccaatccttcctcttttcaagataaggcctgtttttcccagggctctggggaaccacacctagaagaggctgttccagacaagtctagcattgcttccctttttctgataaggttccattgttgagaacactccctttgtttcttacctgtctccaaaacattctggaatttacttctattttagtttgctgatgtggccattactgttaagtggtggttaattatctttgtattctacattctttttttttttttttttgagacgagtctcactctgttgtccaggctggagtgcagtggtgcgatctcggctcactgcaacctctggctcctgggttcaagtaatgctcctgcctcagcctcccaagtagctgggactacagacgtgtgccaccatgcccagctaatgttttgtatttttagtagagacggggtttcaccatgttagccaggatggtcttgatctcctgaccttgtgatccacccgcctcccaaaatgctgggattacagccgtgacccgcagtgccagcgagaattcgtatttctaacctaacctaatctaatctaatcaagtgattctggcccacagataacacttagagaatcactgggagctgggtgttgtgatttgtgtctgtaatcccagcactttgggaggccaaggcaggaggatcccttgaggccagaagttggagaccagcctggacaacacagcaagacctcatctctactaaaaatttaaaaagtagccaggcatggtagcatgcacctgtagtcttaactacttgagaggctgaggcaggacgatggcttgagcccaggaatttggctgcagtgagctataatcacaccactgcgcttcagcctgggcaacaacagagggagaccctgtatgttaaaagaaaacaaaacaaaaaaatcattggcttaaactgacatttatataatgtcaaactgattaggctgggtgcagtggctcacaccttgagctttggaaggctgaagctggcagattgcttgagctcaggagttcaggaccagcctgggcaacatggtgaaaccccatcataaaaagaaagaaagaaagaaagaaagaaatacaaattctcagctcttcttccttcctttccttccttccctcctttcttccttccttcctccttctttcctttcttcctccttcctttcttccttccctccttccttctttctctctttccttccttccctccctcccctcctctctctctctttctctttcttccttccttccttccttccttccttccttccttcctttctttctttctttttctttctttctttctttccttctttgccttccttccttccttctttccttccttccttccttcctttcttcttttcctttctttcctttatttcctttatttttctattgacaggatcttgcgctgtcactcaggctggagtgcagtggtgcaatctcactgcaggttgctcactgcaaccttctcccccaggctcaagcaatcctcccacctcagcctcccgagtagctgggactacaggtgtgcaccaccatgctggctattttttggtatttttagtagagatggagtctcattatgttgcccaggctggtcttgaatttctgagctcaagcgatccgcctgccttgtcctccaaaagtgctaggattacaggtatgagccaccatgcctggccaaaaccccgtctctacaaaaaatacaaaagtagccaggtttggtggtgtgcgccagtagtcccggctacttaggaggctgaggtgggaggatagattgagccagagagatcgaggctgcagtgagccattatcccaccactgtactccagcctgggtgacacagtgagacgagactgtctcaaaaaacaaaaacaaacaaactgattatattgaagtatcataaagcaagttatagacatgaagtcacccacaaaacctaaaaatgtccacttcccaggggttcaattctctactttctcttgctgtccacatctaatctgttttgaagtttttcttgtctagcttcaacatataccctgaacccccatcctttctcctacatcgtcttagcccaagctcatatcccctctcgcctagaataccgcagccacttctcatctggtatcctctcccagtcttgacccaactccccacacagtcacaggggttatcgttggaaaatgcaagtcagatcatatcactctgttaaaaacacatccagtggctactgcaattagaataaacggcaaacttcttttatgactgacaagaacctgcatgcccagaccctgcctgtctgtctggcattctcgttgcttcttgagccttgtttatcacgctcaggtttactggcgtcttcctctttctgcacatatcaaactcttggtacttgtaattgtctggattgtaccccactcccagcctgaattctgtgcttgacaaaaggctaccttttctatctacttacctaaagaaagtgaagaaatgtctaagatgtgctggtaggtgaaaaagtaaggtgggaagtacgtattgcatacatgttacctttttatttatttatttatttgagatggagtcttactctgttgcccaggctggagagcagtggcgtgatctcagctcaccgcaacctctgcctcctgggttctagcgattctcctgcctcagcttcccaagtagctgggattacaggcatgcactatcatgcctggctaatttttctatttttatttttcatttttatttctatttttttgaaacagagtctctctctgtcgcccaggctggagtgcagtggtgcaatcttggctcactgcaacctctgcctcccgggttcaagcgattctcatgcctcagcctcccaagtagctgggattacaggcacgtgccaccacaccagctaatttttgtatttttagtagagatggggtctcgccatattggccagactggtcttgaactcctgacttcaggtaatccacctgcctcagcatcccaaattgctgggtttacaggcgtgagccactgcacctggcctaaaaattttgtagagacaaggtcttgctatgttgtccaggccagtctcaaacttctagcttccaatgactcccacctcagcctcccaaatactgggattacaagcataagccactgcacctggcctctatgttaccattcaggagatatatagccctttgcttgtacatgattcaactacttctgaaagcatacacaagaaacagttaactcttgttgtctctagggaaagatgctgggtgtctagggaagagtggaagaaagatttttaccagaaatcttttgtaccttttggattttgaaccacattatacctggtcaaagtaaattaacaaataaataccatcaagactaactagttaaataagtagttctgtggttattctgtgcctgtcacaagctgttttttttttttttttttttgtagcactgattacaatctgtaattatcttgcttttgtgtatgtgttaactgatgttttgtccccgtccccgctggattacaaagtcctgagaagagagactgttgctgtttgtgtctcaccattacatgcctaagaattagcacagtgcctggtaaacggcaggatgtcaacaaatatttctctgggattttttggtttttgttttttctgagacagagtctcgctctgtcgctcaacctggagtgcagtggcgcaatctcggctcactgcaacctccgtcccctggttcaagtgattctcctgcctcagcctccccagtagctgggattataggcacccgccaccaagtctggctaatttttgtatacatacatatatatatatatatatatatatatatatatatatatatatgtattttttttttttaagataggatcttgttctgtctcccaggctggagtgcagtggtgctatcatggctcactgcagcctggaactcctgggctgaagtgctcctccggcctcagcctcccaagtagccaggactacaggcatgtgccaccatacccagctaatttttttttttgagaccgagtctgttgctctgtctctcaggctggagtgcagtggcgcgatctcagctcactgcaacctctacctcttgggttcaagcgattctcgtgcctcagcctcaagagtaactgggactacaggcacgcaccaccatgaccagctaatttttgtacttttagtagagatggggtttcaccatgttggccaggctggtctcgaactcctgacctcaggtgatctgcctgccgcagcctcccaaagtgctgggattacaggcatgagccactgcacccggcctcccagctaatttttgcattttttgtagaaatgcggtttcaccatgttgcccaggctggtctcgaacttctgggctcaaatgatccttctgccttggcctcccaaattgctgggattatagggatgagccactgtgcctggactgttttttttgttttgtttttttttttaatatgaaacacttcatgaatttgcatgtcatccttgcacaggggccatgctaatctttgtgttattccaattttagtatatgtactgcagcagggagcataaatatttgttgaatgaatgaatcttgtccagcagggacgaagtggaaaggaaggtgcaatacaatcacttgtggattcaggatctgcatacctgaccggcagacctgcttgctggcttggaacctcctgaagttcatgactgtctaatgaattctgaatcagccatcctctgcaatttccttgctatgtcggagtcagcgagattctattacctgctctgggccttaggtttcatgcctgcaaaatgggccgagtgaaatagatctgtgtttgcctaactggagttgttcctgttctatctttatgatttttgccatatcgtctatattatttagcatttttatatctgtaccatctatattatttacttaacatttttcttgcatcggttcacttatttttagctatataaatattatttcaaaaggaaaccttatgtcaatacataagcagaaaacctatacctcttgccataaatgggagctagaagtaaaaataaagacagtgaaacaacacaatgtgattacatgctggctagagactgttgcctgtacaggctttagggtccagatctgcttgtcctttgtcataaaggagattgggctgggggtggtggctcatgcctgtaatcccagcactttgggaggctgaggtgggagaatattttgaggtcaggagtttgagatgagcctgggcaacatagggagacccttgtctctacaaaaaaaaaaaaaaaattagcagggcataatggcacctgcctggggtctcagctacttgggaggctgaggtgggaagatcacttgaacctaggaggtcgaggctgcagtgagccacgattgtgccactgcactccagcctgggcaagagagtaagaccctgactcaaaaaaatcaaaaacagaaaaggagattgtaccacactgagacttcctactagaggtagaattagaagaggattgaaaaaggggtgactgaggccgggcgtggtggctcaagcctgtaatcccagcactttgggaggctgagatgggtggatcacctgaggtcaggagttcgagaccagcctggccaacatggtgaaaccccatctctactaaaaatacaaaaaaattagccaggggtggtggtggtgcctgtaatcccagctactcgggaggctgaggcaggagtgtcgcttgaacccaggaggcagaggttgcagtgagccaagattgcaccattgcactccagcctgggcaatgggagccaaactccatctcgaaaaaaaaagaaagaagaaagaaagaaagagagagagagagagagagaaagacagaaagaaaaagaaagaaagaaagaagagaaaagaaagaaaggaaaaggggtgactggctgggtgtggtagctcacggctctaatcccagcactttgggaggctgggatgggaggatcacttgaggccaggagtttgagaccagcctgggcaacatcgtgagacccccccatctctacttaaaaaaaaaatgaaagagagattcctttccacagtgctttttaatggtgcccgaatattttaccaaaaataatctcatctacactaggggaaacattgagtttaaattgctcatttcacaaacgtagaaactgaggcccagtatgggggttgaaattttccagggtagtcatttgggaatttgtcaagtctggactgtaagctttcataataggaactgcattggcatgtgcttgggacaggtctggtatacagtgtcattcaataaatgagtcctgagccaggcatggtgacacatgcctatagtcccagctactcaagaggctgaggctggagggtcccttgaacccaagaatttgaggttgcagtgaactatgattgcaccactgcactccagactaggctacagagtaagaccatgtctctagaaaaaaaaaagtaataataaataagaaaaaaagagaaagaaattagttttttttttttagagacggagtctcactctgttgcccaggctggagtgcagtggtgtgatctcggctcactgtaacctctgcttcccgggttcaagcaattctcctgcctcagcctcctgagtagctgggactacaggcgcatgctgccacgcctggctaattttttgtattttagtagagacggggtttcaccgttgttgcccaggctggtctcgaactcctgagctcaggcaatccacctgcctcggcctcccaaagtgctaggattacaggcgtgagccaccgtgcccggccagaaattagtttttattttatttatgtatttattcatttattttgagatggagtctcgctctgtcccttggctggagtgccgtggcgcgatctcggctcactgcaagctccgcttctggggttcacgccattctcctgcctcagcctcccgagtagctggaactacaggtgcctgctaccatgcccagctaatttttttgtatttttagtggagacgggggtttcaccgtgttaaccaggatggtcttgatctcctgacctcgtgatctgcccacctcggcctcccaaagtgctgggattacaggcctgagccaggttctttatcaaacctgcttgttttttgtttttttttgttttttatgatattattctgtttgcatattttggtaccttcttttgtgtctttaataattattagctcatctttcgatggtttttgtgcaaacatgctattatctgaaagtacgcctttgcttgctgggttgactcctagctccaggaggatgatttctatattgtaattttggattacatgagccccaaggcctgatttcctgcccttgtatttgcattgcattaggaggtctttgctttctgagacccgtgacacctcctcctctggcatagtatctatcagttcacactaccggttgggtttcagttccatttttgttttttgacatgggggatttccctttctttcctgtgaaccctgtgattcatttaaaagagtacttgttatcttttactcagaatttccagatgtttttgcgggtggggttgagtgtttcaggctatctaatctgctgtattgctggaaactgaccacctttgcgctttttttagtttcttttctctaccccctagctctgaatattcagtttctgttctttcatttcccaccctactccctcctgtctcatatatcttttataccttcagcttcaaatccttttcttaacaagttgatttactctggagtttctaatttaaatgcatcccaggtggcaatctcacaggtcaacctggttcctgttgggccagatattctgggtccagctatctcataaatcacttgccctgcccatgcattggctgcccctggggctgatgcccatgtctgacacaatcagctgtggtgtgagcagaagttgccagtcacatggtaccaaagaaggtgacttctgctctgtctttagaagggtctgtgggtaagtggggcagacatcatgactgacatgtacagtaacatccttaacaggtttgcaatgtagttgattgataatagccagaaggtttaaaatatttttttttttgagatggagttttgctctttttgcccaggctggtgtgcaatggcgcgatctcggctcactgcaacctctgcctcccaggttcaagtgattctcctgcctcagcctcccgagtagctgggattacaggcatgcaccaccaccctggctaattttgtatttttagtagagacgggttttctccatgttggtcaggctggtcttgaactcctgacctcaggtgatccgcccacctcggcctcacaaagtgctgggattacaggcgtaagccaccacgcctggcaaatttttattttttttaaagctagaatcttaacttgccttatacattcacctctggcatagatactgtttgcatgccccaacatggctactccttccatgttcctactctgtaagtactaaatcattgatagagggtttgtcctctcaaataagcttactgtcatcactttaaaacactatttcttttctttacttttttttttttttttttgagacggagtttcactgttcttgttgcccaggctggagtgcaatggcacggtcttggctcactgcaacctctgcctcctgggttcaagcaattctcctgcctcagcctcctaagcagctggaattacaggcacccgccaccacgcctggctaatttttatatttttagtagatacggggttccaccatgttggccaggctggtctcgaactcttgacctcaggtgatccgcccgcctcggcctccctaagttctgggattacaggtgtgagccaccgcacctggtccccgaattcattttttaaaaaaggaagtgttttattccagggctggagtcagccaacctttaaatgcccccgaaactctatatgatgggataccatgtagccagtgaaacattatgaagctgcttaacattcaacagttaaaaaagatctcccagatactttacttttaaaagaagttgtggatacattgtaggtgtatatatcaatggggtatacaggatgtcttgttacaggcatgcaatgtgaaataagcacatcatggagaatggggtccagatactttaagttaaaaaaaaaaaaagagataaagcagtgtgtataataggccttattttgtgttacaaaaatgtatatatatatagaccagatgcggtggctcacgcctgtaatcccaacactttgggaggccaaggcaggcggatcacttgaggttaggagttcaagaccagcctggccaacatggtgaaaccccggctctactgaaaattaaaaaaattagctgggcgtggtggtgcacgcctgtaatcccagctacttgggaggttgagtcaggagaattgcttgaacccgggaggtggaggttacagtgagcagagatcacgccactgcactccagcctgcgtgacagagggagactccatctcagaaaaaaaaaaaaaagaatatatataaatacgtgtgtgtgtgtgtgtgtgtttatttgtaaatgcatctcttaaataatacctaagaaattggcaatggtggctcctctggaagaggaagtgggtggctgagggacttacatcgcatttcctttgtagaagttaaaaataaatgaagaggctgggcgcagtggctgacgcctgtaatcaaagtgcaagcagcagtttgggaggccaaggcggaaggatcacttgaggccaagagttcaagaccagcctgagcaacatagtgagaccttgtctctacaaaaaaattttaaaaattagctgggtgtggtggtatgcgcctgtagtctcagctactcaggagcctgagaagcagtggaatagtttgagctgcggtgagctatgactgtaccactgtactccagcgtgggtgacagagcgagaccttgtctctaataaaataaaaaataagggcagggtgcggtggctcacgcctgtaatcccagtactttgggaggccgaggcgggtggatcacctgaggtcaggagttcaagaccagcctgggcaacatggtgaaaccccgtctctactaaaaatacaaaaattagctgggtgtggtggcatgtgcctgtaatcccagttactcgggaggctgaggcaggagaatcgcttgagcccaggaggtggaggttgtagtgagccaagattgcaccattgtactccagcctgggtgacagagcgagactctgtctcaaaaaaaaaaaaaataaaataaaataaaaggaaggaggaaaaaagaaaggaaagaggaagagaggaggaaaggaaagaaaatattgtctgggtacagtggctcatgcttgtaatcccagcattttgggaggctgaggcaggcagatcacctgaggtcaggagttccataccagcctggcaaacatggtgaaacaaaaattagccatgtatgctggcacacgcctttaatcccagctactcgggaggctgaggcatgagaatcacttaacctgggagatggaggttacggtgagctgagatctcgtaacactgcactccaacctaggtgacagagcaagactctgtctcaaaaaaaaaaaaagaaaaagaaaaagaaaatgggcccggagtggtggttcactcctgtaatcccagcactttgggaggctgaggcgggtggatcacctgagatcgggagttcgagcccagcctgaccaacatggagaaaccctgtctctactaaaaatacaaaattagccaggcgtggtggtggacgcctgtaatcccagttactcgggaggctgaggcgggagaatcgcttgaacccgggaggcagaggttgtggtgagccgagatcatgtcattgcactccagcctggacaacaagagcaaaactccgtctcaaaaaaaaaaaaaaaaaaaagagaaaatgtaagaatagctcctaagccaagctgggaaaatatttgctgaagaatggcaacacctcacatttatctgtctctagaaaaaggcaagggttaagtcagttcctcaaaaaggccacctcagaagccatggcctttccactggcagtacttctctcttgactttacccttaagaggaattgggatctcagatctatataccaagcctggcccatatgtttgaggtcatgaaaaagaatgtgggggccaaaaattcatcctcctagctcagtgtcttcaagcctttggctgaatcgcagaacagcaacaaacatatttcacattgtgattcagtattgacacttgtatttctttctctttttttgagatggagtttcactcttgttgcccaggctggagtgcaatggtgcgatctcagctcactgcaacatctgcctcctgggtttaagcaattttcctgccttagcctccagagtggctgggattacaggtgcacgccgccatgcccggctaatttttgtaggttttttttttttttttaagatggccggctaatttttgtatttttttagtaaagatggggtttcatcatattggtcaggctggtctcgaactcctggcctcaggtgatccgcccaccttggcctcccaaagtgctgggattacaggcgtgagccaccacgtctggcctatatatatacatatttgtaacacaaaaaaaggcctattatacatactgctttaccttttttttttaacttaaaagtgtctgaaccccattctctgtgatgtgcttatttcacattgcaaaactgtaacaaaacatcctatgtactccattgatatatacacctacaatgtatccacaactttttttaaaagtgaagtatctgggagatcttttttaactgctgagtgttaaacagcttcataatgtttcattgactacatgatattccaacatatatagtttggctgactcttggtatcccatcatataaaggttggctgactccagccctggagtaaaacacttccttttttaaaaaatgaatttggggaccaggtgtggtggctcatgcctgtgatctcagcacctagggaggctgaggcgggcagatcacctgagatcaggagttcaagaccagcctagataacatggtggaaccccgtctctactaaaaatacaaaaattagccggacatggtggtgggtgcctgtaattccagctgcttaggaggctgaggcaggagaattgcttgaacctgggagacagaggttgcagtgagccaagaccatgccatggcacgccaccctgcgcgacaagagcaaaactgtcaaaaaaaaaaaaaaaaagaaaatgagttttaaagtgatggcagtaagcttatttgagaggataaaccctcttccagtgatttagtacttacagagtaggaacatggaaggagtagagatgttggggcatgcaaacagttctatgccaggggtgaatgtataaggtaagttaagattctagctttaaaaacataaaagttaaaaccctgtggctattatcaatcaattacatggcaaacctgttaaggatgttactgtacaagattttgcatggacatatgttttcaattcacttgggtatatacttaggggtataattgatgggtcatatggcaattctttgtttaacactttggagaactgcccaccaattttgcgaaatggagtaccattttacagtcccaccaacagtgtacaaatggttcaatttctctacattgtggttaacacttaaaaaacaaaacaaaacaaaacaaaaaactggggtcaggcacggtggctcacgcctgtaatcccagcactttgggaggctgaggcaggcggataacctgaggtcaggatttcaagaccagcctggccaacacggcgaaatcccatctccattaaaaatacaaaaaattagctgggcctggtggtgggcacctgtaatcccagctacttgggaggctgaggcaggagaatggctcgaacccgggaggcagaggttgcagtgagccgagattgtgccattgcactccagcctgggcaacaagagcgaaactctgtctcaaaaacaaacaaacaaacaaacaaaaaccaaaaaaaaccccaaaactggaatgcttcacagaatttgcatgtcatccttgtgcagggaccacactaatcttctctgtattgtttcagttttagtgtatgtgctgccaacatgagcatagtccttatttttattttagccctcttacagtgggtacttttaaagcatttgatagcaaatgattttttcttccaaggcaaatatgtttaatatgtaagtctagaaaggaaaagcaaaacaaaaatgagctgggcttcaaattcttccagctgtggagtcatttgcaggttgtggagcaggacaagtctgttgcagccaggccaggtgccaattccaacaggcgcatgtgtcatctctggcacaaaaatcacaggtcaccaaaccctgatttgagtttaaaggaagaggcatgaataaggcaactctgggttgtaaagctcaggctgctctttatctccaaaaatttgtcttaaatatgattcttctcaggggtgtttttcccctcttttaagcaaaacaagaagtcaagtacttgtttaccctaaattgcattttttgatctctctcttctgctctctctttccccctcagttgtgtgtccttcccagggagaaaagtggttcagagtacagcctgggggtggagcttggggctgtgccagctcattttcagattaggtatttcgtaacagagttttaggcatgtgcagggtttaggcttctacccaaggaatctattttcacttgcagggaaatttcacactgtaattactatcatgaagcaaaatatggtgtggggtgagggaggagaacattgttactaacccttggatattaacccctacgaagcaagtttggaactgccatacattatcattattaacatttgagtgctctgtgcttgacactgtgtttagagctttcactatgctgttctatttaatcctgataataccctatgacataagcattattgttgttgctattattatcattatcagtgttctcactttaggaaatggaggcacagaaagttcaaataaccagccactatcacacagctttgtaagtagcagaaccagcttagcaggttaggcagtgagtgtcaaagcccacattttcttttttctctttttggactccagggtggagtgtaatcaccttgacttccctggctctagtgagcctcctgcctcagcctcccagtagctgggactaaaggtgcatgccatcatacttggctaatttatgtatgtttgtatgtatttgtttatttttgagaccgtgagccccacgatcttggctcactgcagccttaacctccttggctcaggtgatcctcccacctcagcttcttgagtagctgggaggctacaggcgcatgccaccacacttggctaatttttttttttttttggtataggcagggttttgccatgttgcccaggctggtctcaaactcctgagatcaagtcatctgcccacctggccctcccaaagtgctgggattacaggcagagccactgcgcctggccataatttttctaattttgtagagacaggggtctcaccttgttgcccaggctggtcttgaactcctggaaagtccacactcttaaccattagggtatctggctatatctcacacaatgaaagagggaagaatgtgggagatagcagtagggacagaaactgaggcacgaaaatgacttgagcccaaaaggtccaggctgcagtgagccgtgagcatgccactgcactacagcctgggtagcagagtgaaaccctgtctcaaaaaaaaaaaaaaaaaaaaaaaatcagtcgggcacggtgtctcacttttgtaatcccggcactttcagaggctgaggcgggcggattttaagaccagcctggccaacatggtgaaaccccatttctactaaaaacaaaatttgcctggcgtggtggtgcacgcctgtaatcccaactactcaggaggctgaggcaagagaatcgcttgaacccaggaggcagaggttgcagtgagccgagattgtgccattacactccagcctgggtgacagagtgagattccatctcaaaaaataaaaacaaaggccgggcaaggtggctcatgtctgtaatcccagcactttgggaggccgaggcgggtggatcacaaggtcaggagttcaagaccagcatggccaacatagtgaaaccctgtctctactaaaaatacaaaaaattagctgggcctggtggcaggtgcctgtaatcccaactactcgggaggctgaggcaggagaatcgcttaaatctggggggcagaggttgcagtgagcagagatcgcgccactgcaccccagcctagatgacagtgtgagacttcacctgaaaacaaacaaacaaaaaaaccccaaacaaacctgtgtaccctaaacctaaacgtactaattgatcacattttgccatatttgctcatctgtactctctctccctgtgtgtgtgcattttttctccctaaatcatttgagagcaagttgcaagcaggctagttaccattgttaccggtctggagttcctttcatataaaacatgtgacccaagctagatcaattgaacagattactcttcggaatttgaatcttggaatagggtaatgagaggacaggataaaatgagtggtcttttctagatctactgctggtctcagataagatgttcaagtatggccaggcgcagtggcttacacctgtaatcccagcactttgggaggccaaggcaggtggatcacctgaggtcaggagttcaagaccagcctggccaaagtggtaaaatcctgtctctattaacaaaaattagccaggtgtggtggcacatgcctgtaatcccagctacttgggaggtgaggcaggagaattgcttgaacctgggaggcggaggttgctgtgagccatgattgtgcaattgcactccagcctggaccacaagaacaaaactccatctccaaaaaaaaaaaaaaaggaaaaagaaaaagatgttcaagtatcttcaagtatcttctcttcccttgctttctttttctttatttaaatctttttttctttttttatttattcacttttacttttcttcttttcttccctttgtttctgacatttccgacctggccctccagacttcccattgattctttgagttcctggatatcattttgctacatttcaaagtctattgctgttgcttgcaacccaagaatcctaactggcacagctgcccttgaggaagttcacagggcagcatgtaagtagaggcttcatgcactcagaaatatttgtaggcaggatctcttcatttttggagggcttgttctagttgaccttctaatcgtatcctcagagaatttgtgcctttgggtcccctaggtcaagccaattttattgaggaataatttcagaatttgaaattattcttcctacctattaaaagttctcagccacagttcaacaaaacttcacacttacatagtatttcaataatccattgctgcatagtaaatcactgtaaagattagtggctgaaagaacaacatctttattatctcccatgattctcttggttgattaggtttggtgggatggttcttctgttccagttcttttttttaaaaaattatttaattatgatttagttttttttcttttttttttttttttgagactgagtctcgctctgttgcccaggctggaatgcaatggcgcgatcttggctcactgcaagctctgcctcctgggttcaagcgattctcctgcctcagcctcccgagtagctgggattacaggtgtgtgctaccatacccagctaattttgtatttttagtagagacagggtttcaccatgttggtcaggctggtcgcgaactcctgacctcaaatgatccacctgccttggcctcccaaagtgctgggattacaggcatgagccactgcgcctggccatttatttttatttttaaaaactacctattttccttttttataacttttttttcacaatgttctggtcaacactatagtcacctggggcctctaaggactgaaatgtatgagaaggctcatttgcatggctgacagttactgcaggctcttgcctggaatctcagctggggctgccaagtggagtgcttcagtttttacttcatgtagcctctccatgtggcttaggcttcccataatctggcagctgggttccatgaggaagaaagtgtaagctgccaatcatctttattttattttattttattttattttattttattgagacagaatctcactctgtcgcctgggctggagtgcagtggcacaatcttggctcactgcaacctccgcctcccaggttcaagcgattctccttcctcagcctccagagtagctgggtttacaggcatgtgccacggcgcctggctaatttttgtacttttagtagagacgcggtttcaccatgttggccaggctggtctcgaactcctgacctcaggtgatccacctgcctcagcctcccaaagtgctgggattacaggcatgagccaccccaatcatcttaaagcctagacttgaaagtcccatgacatcacttccactatttccattggtcaaacagttacagagtcaactccagttcaaggaagaggaaataaagcctacctttcgatgtaggagtggcctgtgcaaacagcaggaaagaatgatagtgggcacctacacagactatcttgtagagtgtgtcactcatttggcttagattttgagtctagagcagtgtttccacatgtcactcactacaagatcacctacaggttccatcaaactctgccaatgtttgccaggcgcagtggcacacgcctgtaaatcccagcatgttgagaggccaaggaggttggattacttgaggtcaggaatacaagaccagcttggccaacatggtaacaccccatctctactaaaaatacaaaaattagccaagtgtggtggcacgtgcctgtaatcccagctactcgggaggctgaggcagaggaagcccttgaactcaggaggcggagattgcagtgagctgagatcacaccactacaccccagccggggcaacagagcaaggctctgtctcaaaaaaattcagctgagccagaagtttgaggttacagtgagccatgattgtgccactgcatttcaacatggagaaaccccgtccctactaaaaatgcaaaaaattagctgggcatggtggcatgtgcctgtaatcccagctactcaggaggctgaggcaggagaatcacttgaacccgggagtcggaggttgtggtgagccgagatcacgccattgcactccagtctgggcaacaagagtgaaactccatctaaaaaaaaaaaatttctaaaaaaattcagatggtgtatggtatgaatcattgtgaagacaaagcagggtgatatgactgtgtttgtgcctgtgtgtgtgtttagtgctttagaagttctatccgagaaggagacattgcagcagagacttgaatggcaatagagagcaagccaggaggaaagaaaattctaggcaaaaggaacaacaggtgcacaggtcctgaggcaggaatatgcttggtgtgttcaggaatgttagtgtgacatggggtgagatatagggagagatatatcacctgagatcagggaggggagcagagaccaaatcaattagggtcagagtagtttgttttcttaaatggagtcagggtctccctctgtcacccaggttggagtgcactggcacaattacggctcactgcagcctcgaacttccgggctcaagcaatcctctcacctcagctttctgagtagctaggactagaagcgtgggccaccacacccaactagggtctgagttttatcccaaatgcaatgggatgccattcgaagctgtttaggttggaagttttttgttttgttttgttttgttttgtttttgagatggagttacgctcttgttgccctggctggagtgcagtggcatgatcttggcttactgcaacctctgcctcctgggttcaagagattctcctgcttcagcctcccaagttgctaggactacaggtgtgtgccaccatgcccagctaattttgtatttttagtagagacagggtttcactatattggtcaggctggcctcaaaaccctgacctcaagtgatctgcctgctttgccctcccaaagtgctggaattacaggcgtgagccaccgtacccggcctaggttggaagtaacatgatttaatacatgatttttcaaggatccctctggctactgtattgggagtgccctgtagaggatgaaagggagagaagcaaggagagtagctaggagacaggtgcagttgctgaggtgaaaggccatacacgtgtgagcatttcatctctgggttctcagcatctaacgcagtattttattttattatttttattttatatatatatatatttgaaatggagtctcactctgtcgcccaggctggagtgcagtggtgcaagcatggctcactgcagccttgacctcccctactcaggcaatcctcccacctcagcctcctgagtacttgggaatacaagcaggcgccaccacaccaagctaattttaaaattttttgtagagactgggtatctgctttgttgccaaggctggtcttgaactcctgggctcaagcaatctctcggccttccaaagtgttgggattacaggcctgagccactgtgccctggtggaaatatatatatatatatttttttgagacagagtttcgctcttgtggcccaggctggagtgcagtggcgcgatctcggctcactgcaacctctgcctcccgggttcaagtgattctcctgcctcagcctcccgagtagccaggattataggcgcctgccaccatgcccagctaatcttttgtatttttagtagagacggggtttcgccatgttgggcaggctggtctggaacttctgacctcaggtgatctgcccaccttggcctcccaaagtgttgggattacaggtgtgagccaccgtgcccggcccagaaatgagatatttaattttttaatttttactttttttttttttgagacggagtttcactcttgttgcccaggttggagtgcaatggtgccatctcggctcaccgcaacctctgcccccaggttcaagtgattctcctgcctcagcctcctgagtagctcggattacaggcatgtgctaccatgcccagctaattatgtatttttagtagtgacggggtttctccatattggtcaggctggtcttgaactcccgacctcaggtgatctgcctgccttggcctcccaaagtgctgggattacattcgtgagtcaccgcgcccagccaaaatgagatattttaaataacataagtaaacagaaatatatcatgattttaatgataattcatgctctgaaaataaatgaagaaaggaataggagtagggaaagctgggatcagagtgggcaggaagttaaaatagagcagttagggaaagcctcactgaataagtgacatttggacaatgaccatggggagattagggaatgggttatttgaattttctgggaaaatactgttctaggcagaggaaatagcaagtgcacgatctttaaggccagagtgtgctaagcacgttggagaggccgagtccattgtagctgagttacagaagtgagtggaagagaagaaggtgatgagtttagagagggaagggcagggcaagagacgggctgtatggggctttgcaggttactgcaagaattttgcaggagggacagagactgacttggttcttaccaggattcctctggctgctgtgttgagtatagactctaagaggaaagagtggaagcaggcagaacactgaggaggctgttgcagtggtccaggtgggaaatgatggtgctgaccgtggaggtggtaagtggtcagattattctattttatttacactcaacacatctaatactgactcaatattatctaacatacagtccacattgaaattgccccccaaattctttttacataaaaaaatcatcctgaatccaatcaagtctcacctattgcttttggttttcacctctttcatgctgtcatattttaaaagactccaggctagatgttgtgtagaatgtcccacattctgaattcgtttattttttcaagtaagctttttgtgtgtatgtggcaagaatacgacagaggtagcaatatgctttccccactgcatcatattaggagacacataacaacagtcctgacccattattggtggtgctaagttcgatcacttggtaagggggtgcctgccagatctttccattgtaaagcaagctgttctttattgtaagtcataaatacgctgtgggatgatacttcgggactaaatataccctgaatatactgctgcccaacaacatttcacccagtgactttagcagctaaggaacagcctcgtggcttccgaccttgtgcctcagttcgctcatctgaaaaatgaggatgatcatggtccctaccggatgcttgttttgaggatccgtgcttggcataccagaaacgctccacaaatgttaggtattactggacgaaggcaaatatgaaaaaaattaagggcagggctaggactgcattccggttctccggatcccgagggagctcccagtcgatgctgggcgaaagcggccgcacgagcccacgtcgccacgccctccgccgcggaagccagggtgggggtcgctggaaccctaggccggccgcgcaaggccccctgggaccggtagtgctgggcgtggcctcgggactacatatcccagtggcccccgtgcggcgactttagctgctgctgtctcagccgctccacagcgacggcagcggctgcggcttagtcggtggcggccggcggcggctgcgggctgagcggcgagtttccgatttaaagctgagctgcgaggaaaatggcggcgggaggtgagtggagataaaggaggaggcggtggcgggcgagggggtggagtgcgaggcggagggaagaggggcgagttccccaggctgcgagagccagcggcttcagatctgccaaggcactgaggggcgcgccggccgggggacgcgctgaggtagtttcggggtgtcggggccgcgccgcttcccctcagcccggggggcggcccgcggcggtaggagctgagacgaagctgggtggcagtccgcttggggatccgagggggtccccgcgcggaggggtcacccgaggagtttgcggggggactgcaggggcccactttccccttctgtccctaaagttttttcttcctcttgcctcccccagcccttttgaaagctccccgcgtcgtcctcctgctgccccggctccttagcagcttctgggacgcacgggagggaaaagccgcggggaccccccccaccccagcctcccagccgggtgagatttggttgctgtgtttcctcctcacttgggcatttaaaaaatattttaacacgaattgtccgcggaattttcatgttgggctcgggtagcttcttagttttctcggtaaaaaggcgttttactacctctggtgtgaaggctgggaaatggcaagtgggaagttggttgataaaattaggagtttggctgtctttattactactttttttttttttttgctctccccatctctcattttatgaacatcgacccagttcgtcatggtttaaataaactgcttgtcttgtacctgccttaacaaaactagccatgggtcgttgggagacttagttgcttcctaggcagtttgagggcatctagggtggaaaagttaaccgagagagcgagcatctacctcactggcaggatctgggattcccaaatggaatgacacggaagctatgagattctctcgaagtcgaaacttttttccccctcccgaatgcgaagacttcctttttgcaatatttgagcagggcttcaaaaccaacctgtttttgttattaagcctgtacggtaaagaaacaggaaggagagtaccagctgtcttgctgcagtggttttaaatggagttgaatgagatgcgtgagagtggtagtagtattgagtaagattgctgcatctctttgatttaaatgcctggcctcggatccacctaactgatccctggctgcaaaaaagcttcagtatttgttgcagcaggttgttgagaaggtgattggaggaataaaaatcttaggtcttcagcgaatgctgcacaaacgaaaatgttaatggaaacctgtaagtttgtgaattgtttgttcttgaaaatattttaaatgtatgctcatttagaatatggttctaccgaatgatatccaattggaaaggtacaaacacattgaaaagtgaatctctctttcacgccaaaccctacagtttccccttctcagaggcaaagactgttactggtttttagaatatccttggtctttggaataattattttaagattttcatttgaaaccacttctgttggataccaaaagcagggaaataaaatgaacagaagaaacagaaaatgtgggaatactgtttttgctctcttaaaaaaaatgttgatagctattggaaaaagctcttcagaacttactgcttatgtcaccttatctattaataccgttaaataacaatctgtggggctttaggataaagaactctgccagggttcattgtttgtatgtacaatgaatcctctgcttgtaacatgtaaaatgatattgaacactatagctcctgtcactagaggttgcttcaggttctgcatttcaatgagcagaaatctaaattgcctgtgatcctaaattataggggcattttatgtatagatggaaatgacttaattgtccaatcagcatttgaaataagaggcatataccagcttttggcatatagaagatggggattgtggactaagcgggaggctgtaatatttctagagcagttataggaaatatttctgccataagatatttaattacaaaggctttgaaaatgtacaacttaagcatcaatagcgagatttatatttttatattttagaatggttgttttaacagcttgccaacactaacaatttgctaaggaaattcagtgatattagagctaggttattaaagattatattaaataatttaactgtattttgaaaatgattatgctgtgcatttccttctctgtataaaaattatttctaaaaagtgccacgcacctcccgagcaaataaaatagaattcagtaaggagtgaagtactgttgtacgtgagaccctttttctaggcgatatgcaaataaaaagtagtttaaaaatggttgcttactaatgtcttcttgactggtcttttgaaataagctttcttgcagggacattacattaaagataaaagctaagtgtgtctttttttttttttttttttttttttaacgaattcagttctttctgccgggctgcagtggctcaggcctgtaatcccagcactttgggaagccaaggctggtggatcacgaggtcaggagtttgagaacagcctggcaaagatggtgaaaccccttcactactaaaaatacaaaaaattagccgggcgtggtggcgagcacctgtagttccagctactcaggaggttgaggcagaagaatggcttgaacccgggaggcggaggttgcagtgagccgagattgcaccactgcactccagcctgggcaacagaatgagactctgtttcaaaaaaaaaaaaaattctgtcttgtgcattagcagtatgattctggaataattcattttaacttggagtactgtaattgaaaagtctttaaaagaaaattaaaaaataaattttagtttggacaatagggtaagatttaaaaactctgctattgtcctatcccaaattgatggttaaaataaatggctttgggtttttggttttttttttttttttttttttttttgcgggcaggggcgttttttttttttcttttctttctttttttttttttttgagaaggaaatttgctctgttgcccaggctggagtgcagcggcgcgatcttggctcactgcaacctctgcctcctgggttcaagcaattctcctgtgtcagcctcccaagtagctgggattacaggtgcgcaccaccacgcccggctatttttgtatttttagtagagacaaagtttaccatgttggccaggctggtctcgaactcccaacctcaggtaatccacctgccttggcctcccaaagtgctgggattacaggtgtgagccatcacgccagcctgcattttttaaaaactatataatttcacactttggccagaggaggtagagtacttttgaaaacttttaatttgttgcaagtttagaatgcatattagccgccagtgacttttggtctacaacagcaaatttgtcacaatttaatacagttgttaccctgtaaagctatctaggattagaaaaaaaacaagacttgttgatcatgattgaagagattacctgtagcagtttggttcatatccttggtataaatatttgttttttgcattactgagcggttaaagctctgagagcagaaaattagtattggaaatgtatgttaactttttcttatttttttctcatacttcaaaaaattgaaaaacaaggggactatattggtttggattctcaggaatagctttgagattgagtgctgcagtaaaatgtaggcattttctcctttttttttttttttttttgagacagagtctcactctgttgctcaggctggagtgcagtggcatgatctcggctcactgcaacctctgcctcccaggttcaagcgattctcgtgcttcagcccctgcccgagtagctgggactaccggcgctcgccaccatgcccggctaatttttgtatttttagtagagatggggtttcatcgtgttggccaggctggtctcgaactcctgacctcaagtgatcctcctgctttggccttccaaagtgctggggttacaggcgtgagccaccgctcccggcccattttctcccattttatgagtgcttcttggggttggggaggggttacaaaataaacacttcagaattaaggtggaggaggggctttgtggtaatgaggcatattccatgagtttggtcatgtttttactaggtaaattcattttgtctatcatttttctgagagggtttctgggagaagattattttaggttaaagatgcaatttatccagagcctaactttattttcagccccctaacaaattatggaattgaatttaattgcctttccctttcctaccttctggtggagagtttttaaatgaacaggaaaatggccagaaaatacacagcaggagtaggatgggagacctgcagtgtgtagaaggccgatttatccacaaactggataatcttcttaggctgcatactgccagtaccaaactttgttagcattaactcagtttggtaggtactgccagcctaggtcagtttacagtggggggcagtaatagggtttatttaactaactgtgtagtaaactttgtggcctaaaggcaaaggaaaggagtcggacctgactggcaaacaggttttacccatttaaagtaatattccaagagcaaatggactagtgtctattttgtttggcttttaaaatatttttgttaggaacatctgtgtctttttttttaaattttctgttaatttttttattgatatgttctaggaaagggtgtgacatttttcatctgttattcctatgaaaaggtattctgttgaaatgtttaatttccttggttagaggctatgaatgagggttatgcagcttcactttttggaaaccagggtgactagattactgaatttaactattgattagccacataatgatgaaaagggaatcttggcctgggtatcacacagtaatggataatctgcttcctggggctttgctttggtggctatggcagctgagttggcgtggtagatggatagatgggaaaggactgcagaagtcagcataatcctcaattaggataagccttatggttaattgaatgttgagtgtacaggttaaatcccattataacgaactccaggggactggccaaattattttgttgtactgggattagactttattaaatattgtttaaaacagtctttttgttagaggtgttagagattttggaaaaatttccatttattgtaacaatttgacaagttgttcatgaaccttccatctttaatgcttttacctttaaaaagaaaagaaagcatgttgagctgggcagtggcagagcatgtatatcacccctccacaccatgttttgagtagctcttggtttatgtcgacaacctaattagtttgttagtaagtactaccaccatctaagtgtggtcagaagaatgggaaattccccaggtttgcaggtgactggtgctgttaattttttctgtccccaacaacatgtatatatatttttaaatttaaccctgatccttagagcacccaacaactttttgttgttgttgttgttgttgttttgagatggagtttcactcttgttgcccaggctggagtgcaatggcacgatcttggctcactgtaacctttgcctcccaggttcaagtgattctcctgcctcagcctcgtgagtagctaggattacaggcatgtgccactacacctggctaattttgtatttttagtagagatggcggtttctccatgtgggtcaggctggtctcgaattcccagcctcaggtgatctgcccgcgtcggcctcccaaagtgctggaattacaggtgtgagccaccacgcctggccaacaacttttaaaaaataaatgaatatacatcattttagtgtgaaatttaagtcagtaataattgacttagcccctttctcctcagctatcaatgtaggttgagatttttaggtctataaattgtattgtttaaaaaaaagggatagtaatgatgtagtttttaacttcgtgatactatccatataaatatgaaaattttcagaaacaagcttaatttatatacatataagaaaaagactgttcttatgcttggccagaaatatacttctttctgtcctgtacttttattaggttggtgtttgccaagcttcaggcatttacatcccaccttcatatctaaggctagcatttttagtttgtttagagaatttggattgggtgcagcaagacatttttgaagtcattcttttaaatagatgttccatgaaggagggaaaatctgaaagaaggaatttcaaagcaacccaagcagtgttttgaaaattctcaagactgaagaataatgactgactagtaggcaggaagcctgcagttgtattgtggtattgttcctccatctcatgcatttgagaactttagtacaaaagaagagaaagcatggggaggggaagaaagggttttaacaaaaaagggggcacttttggagtaaatattctttgcccttctgtttaaatgaaatctaaagccatattattttactttgaaagaaaatgtgtatcataatagaaatgtcctaaactgacatttttataaatgaaagttaattgctgttggtggaaagagcagcatgatcatatgttcagtttcaaaacagaactttgattaaaaagaaatctacatgtgaaaacctttttttcctttttggtacctgatcaatatattttgttagcttgttactttgaaaagaagacttacctagggcagagttcagaataatttgtaagcatgtgctataagctttggacaaatcaatctctcttggccagtttttaaaattttaaaacaaagggtgctctgtatggttttccaaggttccttattttatacaattctataaacttaaggcattatgtagatatgtacaatgctcttttacttaaattttgttgattgaacataaatgaattaagctctttataccagataaccgtgtgaagttagatgcagctttcagtgctgacttataaagaatttagaggctgggtcccatggctcacacctgtaatcccagcactttgagaggaggatcacttgagcccaggaatttgagaccagcctgggcaacaaagtaagatcctgtctctataaaaaataggaaaaaaaaattagccgggcatggtgatgtgcgcctgtggtcccagccgcatgtgagactgagctgggaggatgacttgagcccaggaggttgagggtgcaatgagctgtgattgtgccattgcacaccagcctgagtgacagagtgagaccctgtctcaaaagggactttaatcgcctgacttcatcacagtatatgctataactgggtaaaagtgtgtgtgtgtgagagagagggattttcagtcccctccttctcgtgtaagaaaagcaagtgttactttctttactctcagtgaaattgctgtcgttgaaatggattatttaagtcatcttgtggagtagctatatcagcttgagtttgtttccagattgaaatttggcaattttggggctgagtgcagtggctcctgcctgtaatcccagcaatttgggaggctgagaccagagacttgcttgagcctaggagttcaagaccagcctgggcaacatagcaagacccccccatctctattaaaaaaatttggcaattttatttgaaaatgttataagagttactcagtactgtttatcaaattgtccctttagtctactacacactctgtgttccatcccagctcatctatttccttttacttgcttggtggtaattgtgttttatgacaatgtgttaatctcaattgaggtagttgtcttcaccgcagttggaacagtagttgactacatataggaaaatctaccagtgaagaaactccaccagtgagaaaaataactctacacatcttgcatcattggagggtcagtgatatctttgtcatataataagacaggactgttaccatattaagtttaaaactactttcatcaggaatcaataaaatggaatccagaaagcgactttaaacgtacacagtcatggccaggagtggtggttcacgcctgtaatcccagcactttgggaggccaagatgagtggatcacgaagtcaggaattggagaccatcctggccaagatggtgaaactccgtctctactaaaaatataaaaaaattagctgggcatggtggcgggtgcctgtaatcccagctactcaggaggctgaggcaggagaatcgtttgaaccctggaggtagaggttgccgtgagctgagatcgcgccactgcactccagcctgggtgacagagcaagactccatctcaaaaaaaaaaaaaaagtacacgatcatatctagaatggtagaagccttgagtgtatgggttctaagatttggcaaacctgtaagcatgaacttgcccagtaaccttcagtttcccttttctttcccccaaatcacaatatagtcatccacatgggacttttaaaaattaattcaatttttggagagggtcttgctctgtcatctaggatggagtgtagtgtcaccatcacagttcactgcagccttgacctactgggctcaagcggtcctcccagcgcagcctcccagtagctgtgactacaggcacatgtcaccactcctggctgatgtttttaagttttgtatagaaggtgtgtctttggctggtcttgaactcttgggatcaagcgatccttctgccttggtctcccaaagtgctgggattacagatgtgagccatcgtgcccagtatagtgagttttcttaaacttagttttcataccactcttctaagtcttgaggccttaaacttcaatcatctttaatttgctgctgcttggttgttgttgcctactcttccatgcacagacatacttaatcagtgattattatgcctttactatttaaggaactgtgagagttaacaaagtttgtgacctccaagtgtgcacaatcaatcaggtactcatatcacttcagtacaaggcaatcagtgataagtcggttttgcctatagagattgtagagaagttcagaggaggcaagggactactactgatccaggccatcagggtacagcatgttgaagaataagatttaaacattttctttctttctttctttttttttttttgagatgggggtctcactgtgttgcccaggccagagtgcagtggcatgatcatggttcactgcagccttgaccaccagggctcaagcggttttcctgcctctgcctcccaagtagctgggactacacgtgtccaccaccatgcctaattttttttttttttttttttttgagacagagtctctctttgtcacccaggctggagtgcagtggcgtgttcttggctatatagatatatagctgagatatgtatctctctcgagatatatatatatatatatatatatatatatatttctttttttttttgagacggtcttgctctgtcacccaggctagaatgcactggtgctatctcagatcaccgcaacctccacctccccggttcaagtgaatctcctgcctcagccacccgagtagctggggttacaggcagcactaccacgtggacccagctaatttttgtatttttagtagagacggggtttcaccttgttggccaggctgatcttgaactcctggcatcatgatctgcccgtctccaaaataaaataagtgggaactatgctacacatggacatattgtgtggaataatagacaagagactaggaagggtgaggagggggatgatgagagattacttaatgggtacaatgtatgtgatttgagtaaatgatgccctaaaagtcctggcttcaccactaggcaatctatgcatgtaacaaaattacacttgtaccccataaatttatacaaattaaaaaaaatcaggctgggtgcaggggctcatgcccataatatcaatactttgagaggctgaggcaggaggactgcttaaagccggaagttaaagactaggctgggcaatatagtgagaccccatcctatgaaaaaaaaataggaaataataaaataatttttacaaaaaacaaaatataaacacaaaaaaagtttttcttctagaaaaaataactaatttacatctcaataagataaaaacaatccaacttaaaaataggcaaaagagactggaccccgtagctcacacctataatcccagcactttgggaggctgaggcgggcggatcgtgaggtcaagagatcgagaccatcctggccaacatggtgagacaccgtctctactgaaaataaaaaattagccgggcatggtggcacatgcctgtagtcccagctactcgggaggttgaggcaggagaattgcttgaacccggcaggcgaaggttgcagtgtgccgacatagcgccactgcactcgaacgtggcaacagagtgagactctgtctcactaaaaaaaaaaaaaaaaaaaacacaaaagatatatacagagacttcacagaaaaaaggtacaccagtggcaagtaagtacgaaaaaagatgctcaacatcagccattagggaaactgaaaactacaatgagataccactatacactcactatgaggggtaacattaaaaagactgaccataccgtttgttggtaaggatgtggaacaactagaactgtatcatacgtggatacatggctaggagaaatgtgaaatggtacaatcactttgagaaacagtgggcagtttctttaaatttgtaaatattggctgggtgcagtggctcaagcctgtaatcccagcactttggaaggctgaggtgggggatcacttgagatcaggagtttgagaccagcctggccaacatggcaaaacctggtctctactaaaaatacaaaaaattagccagatgtgatggtgtgtgcctgtaaccccagcttctcaggaggctgaggcatgagaatagctgaggcatgagaagagcccagaaggcagaggttgcagtgagccgagatcccaccactgcactccagctggggaaacagagcaagactctgtctcaaaaaaattaaaaaaaataaaataaacttgtaaatattatacacttagcatataacccagccattctacttctgggttccccccaagagaaacacaagcttaggtccacacactaccctatacacaaatacgcagagaagctgcttacttaccatcaaatacatatgaggatatttacttccagttttgtttgaaataatatgaaactgaataaatcatgatataaccatacaatggaatgcagtgtaattattagaaatttctaagcaactattagccgggcgaggcggctcaagcctgtaacctcagcactttgggaggctgaggcaagcagatcattcaaggccaggagtttgagaccagcctggccaacatggcaaaatgcggtttctactaaaaatacaaaaattagctgggcgtggtgacacacacctataatcccagctactcaggaggctgaaacatgagactcacttgaatccaggaggcaaaggttgcagtgagccaagatcgcgccactacactccagcccgatggagcaagactctgtctcaaaaaaaaaaaaaaaaaaaaaaaaaattataagcaactgtaaatcaaactgatatgaatccttccccaagatcatttttaaagtatgtacagtgcaaagcagggctcttgagtgccagttacttaggtgtgttcattttataacaatttagcaagctgtacttgtgcccttccataaatatattatacatcaatttaaagtttgccaaaaatataggcgaaatgcttaaacttaaaaactttaaactatatgcatgtatatgtacctagactagggtaacaatggttccagggcagggaaggaggcagctaagaaaggacggccactgtataccctctgataacttttaaattgatctgatgtgtacctgtaatttatttcaaaaagtattttcttaactgagaccatttgcaactctctttaagtcaacattttcttttttttttctagtatcagaagattttatttttttacttttatttttttgaattttttttttaatttatcaacattttcttaatatagaaataaagtagaggcagagatggatttaggtccataacagttcttcataacccaatttcaaattttctacatatcacaacagtctcattctcactacttttataactgaaaaaacagtataaatttcaaaaataaacttgtaacaaatctttttttattttttttgagacggtctctgttgcccaggctgcagtgcagtggtacaatcttgactcactgaaatctccacctcccaggttcaagcgattctcatgtctcagcctctggagtagctgggtgtataggcatgtgccatcattcccacctaattttttttttgtatttttggtagagattgggtttcaccatgttggcctggctggtctcaaattcctgccctcaagtgatctggcccacctcggcctcccaaagtgctgggatcacaggtgtgctgtttttttgtttgtttgttttgttttgttttttgctttttttttttttttttttttgagacagagtcttgctctgtcacccaggctaaagagcagtggtgcaatctcagctcactgcaacctccgcctccagagtagctgggattacaggtgcctgccactatgcctggctaatttttgtatttttagcagagacagagttttgccatgttggccaggctggtcttgaactcgtgactttaggtgatgcacttgcctcagcctcccaaagtgctgggattacaggcatgagccaccacacccagcctcttgtattttaaatagtgttttgtataagatttcatttgtgttaaaaaaaaaaaattctacagcaaaagaggtttgaaaaaccgggactatgaatgatataatgtatattaagcatttaacactgcccagggacagacacacaaatagtaacttttaatagctatatatatatatttaaaaaaaatttttttttttgagatggagtctcgctctgttgcccacctggagtgcagtggcacgatctccgctcaccacaacctccgcctcctgagttcaaacaattctcctgcctcagcctccccagtagctgggactacaggcgcgcaccaccatgcctggttaattttggtatttttagtagagatggggtttcactgtcttagtcttgaactcctgatgtcgtgatccacccccctcggcctcccaaagtccaaagtgctggaaatacaggcatgagccaccacacccgagctttttctttctttcttttttttttttttttttcttttttttaagacaggtcactgggtcactctgttacccaggctggggtacagtggcatgatctcggctcactgcagtctgccttctgggtttaagcgattcttatgcctcagcgtactgagtagctgggactagaggcatgcaccaccactcccagctaattttttattttttagtagagacgggatttcactatgttggctggtcttgaacttctggcctcaagtggtccgcccacctcagcttcccaatgtgttaggattacaggcgtgagccactgccctcagccttaataccaatattatcatcaatcaataagtggtagcttttctgtggtatatccagacaatggcatattattcagtactaaaaagaaatgtgctatcaattcatgaagagatgtgaagaaaactttaagttttcacttagtgaaagaagccaatttggaaaggccacatactgtgtgattctaactatgtgacatcttagaaaaggcaaaattttggaaacactagaaagatcagtggttgccaggagttagtggggaggaaagaatgagtagacagagcacagtactcagggtagtgaaactactctgtatgatagatactataatggtagatacatgttgttataaattgttccaaactcataaaatgcacgataccaggagtaaactctaatgtgaactacacactctggatgataatgatgcctcagtgtaggtacaaatgtatcaagatggtggggggatggtgataggggaggctacacatgggtttgggcaggaggtatatggcaaatctctgtatcttctgttcaatattgctgtgaacctaaaacgcctctaacaaaataaagtgttaaaaaataaatggcagcttttatcttttctacccaggaataggaactgaaatatagatcaggacacagggaagagaattttattggaataagagggtagaagacagagcaagggtctagactatcaagcaactgacatataaataagatacacacatagaattagaaagatggtggttgaaatgaaaattaatagtcagattatgaaaatctttgggagctccatgtgaagtttagtttcgaattttagacaataaaaaacaaaggttccaagcagtcaagcaggctgggtgcagtggctcaagcctgtaatcccagcactttgggaggccgaggcaggcatatcatttgaggtcaggagttcaagactagcctggccaacatggtaaaaccctgtctctacaaaaaagtacaaaaataaaattagccaggcatagtggcacacacctgtagtccaagctgctcgggaggctgaggtgggaaaattgcttgaactgaggaggcagagattgagccaagatcacgccactgccctctagcctgggcaagagtgagaccctgtcttaaaaaaaaaaaaaaaaaaatttgctgggtgcagtgactcacatctataatcccagcactttgagaggcctagacggatgaatcacttgaagttaggagtttgagaccagccagcatggtgaaacctcatctctactaaaaatacaaaaattagccagtcgtggtggcacatgccagtaatcccagctactcgggaggctgaggcaggagaattgcttgaaccttggaggtggaggttgccatgagctgagatagcaccactgcactccagcctgggtgacagcgagactccgtctcctccccaaaaaaattaccttataatattttttactataacgaaacagtacagagtaaaaagagatgagaaagagaagaaactgaagcagcagttaattccctttagatctattccatcttcttcaagtattcgctaataatcccagttgaaaaggacttttcttcctctgaacttgtgaaccacctgcttatgttgatgcaattacattttcttctttttttcttttttctttttctttttttttttttttttgagaaggagtcttgctctgtcgcccaggctggagtgcagtggtacgatcttggctcactacaacctctgccttccgggttcaagtgattctcctgcctcagcctccctagtagctgggattacaggtgctcgctactacacctggctaatttttgtatttttagtagagacgggtttttgccatgttggccaggctgttctcgaactcctaacctcaggtgatctgcctgcctcggcctcccaaagtgctgagattacaggcgtgagccaccacgcctggccaattacatttatttttcaactagattataaactcctagatcacaaagggattctaacagtcacattacttagcacaattctttgaaaaacagtggtactgaataaaaacatttaaatgatgtaaagaaggatcgtccagtcctagggcaatttagaaaacatggaatgtactctaaggctgatatgattttcctgggacaactctgtgagggagacacaggtcccaagcaaatccctaggaatatttaattttaactccatttccaggtagaaaaactgactcgagggttgaattctaaaaactttcacatccaggccagccatgatggctcacacctgtaatcctaatactctgggaggtcgaggtgggagaattgcttgagtccaggagttcattacaagtctgggcaacatagggagaccccgtctctgccaaaaaaaaaaaattagctgggcatggtggtgcgcacctgtaatcccagccactcaggagactgaggtgggaggatcgcttaagtccaggagttccaggctgcaatgagccatgatttcaccactgtactccagcctgagaaacagagggagaccctgcctcaaaataaataaattaaattgggggaaaaaaaaagaaacataattgaaaaaaataatagaggattttctttttctgttttttttttttttttgagacagagtttcgctcttgttgcctgcccaggctgcagtgcaatggcatgatctcggctcactgcaacctccacctcccgggttttcaagagattctcctgcctcagcctcccgagtagctgggattacaggcatgcaccactaagcctggctacttttgtatttttagtagagatggggtttcaccatgttggtcaggctcgtctcgaactcctgacctcaggtgatctacctgcctcggcctcccaaaatgctgggattacaggggtgagccaccatgcctggccaatagaggatttttaaagcttataaaaggattactccttaccttcaagaaatagacaatttgaatccacgctaccaatcaagaagtactgactcacatgcacacgaacaattaagattcatctaagaaatgactggtgcggtggctcacgcctgtaactccagcactttgtgaggccgaggtgggtggatcacttgaggtcaggagtttgcaaccaacctggccaacatggtgaaacctcatctctactaaaaatacaaaaattaggtgggcgtggtgacgggcacctgtaatcccagctactcaggaggccgaggcaggagaatcgcttgaacctgggaagtggaggttgcagtgagccgagattgtgccactgcactccacactgggtgacagagcgagactccatctcaaaaaaaaaaaagaaaaagccaggcacggtgggtcacgcctgtaatctcagcactttgggaggccgaggcgggtggatcacttgaggtcagaagatcaagaccaccctggctaacatggtgaaatgctgtctctactaaaaatatgaaaagccaggcgtggtggcgtgtgcctgtagtcccagttactcaggaggctgaggccggagaattgcttgaacctgggaggccgagactacagtgagtcaagactgcaccattgtactccagcctgggtgacagagcgagactccatctcaaaaaaaaaaaatgatatttttagttttggtgttctggtaatttacctacattagatggtacctgagatgggcccaacaactagactagaaagcagtggagaaacaagggagaagatggagaaaaaacagtatgtctgaaaccaagggaaattagtctgaaagactgataaaaagacggtgattaagaactgaatatcaggttaagaaatttggagccaggcatggtggcacacacctgtaattctagcactttgtgaggcccacttgggaggattgcctgagaccaggagttcaagaccagcttgggcaatgtggcaaaactcttgtctccacagaaaatttttttttttgagagagtctcgctgtgttgctcaagctggagtgcaatggcacaatctcgctcactgcaacctctgcctcccaggttcaagagattctcctgcctcagcctcccaagtagctgggactatatagatgcccaccaccacgcctggctaatatttgtatttttagtagaaccggggtttcaccatgttggtcaggctggtctcgaactcctgaccttgtgatccgccggcttcagcctcccaatgtgctgggattacaggtgtgagcaactgtgcctggccaaaaaaaaaaaaaaaaaaaaaaaaaaaaaggaaggctacaggttgtcagtggcctcagtgctttcgggctacacccttgtttacagtgacaacaaggtggtattggagtgttacagggtcacagagaagaccttcaattatcaattagaggttttaaatttaaatttaccctggcttttaaaggaacagggtacactgttttctctttactgcttctctctctgactctgtctctctctttctctctttgactccctctttgtctctctgcctctctctctttcctctgctggtctttccctgcctctgccagccacttatgccgctgttctcccctctccttgcccttcccctaggggaggaaccggcaggagtggagctactctttcttcccctgagaagaaaggaaaggggagttctgaatattttccttactaccggaggtttgtgtgaggttcaaccccctgaaatttgcggaaggctcaacccctcaaaccagtggtgtcttgtcttggctttcctggaagactcaacctctcaaaccagggatgtcttgccttgcctgccctggaaggctcaaaccctcaaattagggatgtcttgtcttgccttgcctgccctggaaggctcaaaccctcaaactagggagtgtcttgccttgctgccctggaaggctgacctgtttcctccctttccccctctgaaggtcctttgcgctcactgaacttgtgttgtcctctctggctgctcccctgagggagaattaggcccctcttagcgttggtgtgctggtataaatcccacggcaggatctgccctaagccatatgaggtagctatggaacgcagagggcacccactcactctgtccagcagtaggacttgtcatcatctacacgaacaacaccgcaagtacggttgtttgtgatcattcacgcacatacacatttagcccttcagaatttgaccaccaaggaagtactctaccggctcccacggcttctccttccttggtgtgtgcacagagtcgtcgccgcagtatgtgaagatcttttacctaggttgctggccagtttctttccgccttgctgagagctcagcttattcgtcgcactgcgtgggtcctgatttgtcacccctgaggccgccacaagggggcggggtgcacctcctcacaagagagaaccagagaccgcccccggaggggaatgtaatcacaggcaagcccccaaatttgtataaagtttcggtgccacaaaagaaatagcactcgaatataagattttctttttttttttctcagcaaggcaatttactcttatagaaggatgcaccttcacagatggagcaatggtgagcgcacacctggacaagggaggagaaggggttcttattcctgacgcacgtggcctctgctgctgtgtcgttcccctattggctagggttagactgcacaggctaagctaattccgattggctaatttaaagaaagtgttggggtgagtggtttggcgggaaaaatggctgtggcagagcaggaaacaggaatgagtcaagatgaacaatgagtcagggtggagcaggtaatcagaataagtcagagtggaacaggtaatcaaaaaaggttgctctacagggaagttaagtttaaaagtagaaggcaaagaattgaacatactgacatattctttgaagagaaatttagaactcatatccaacactcaggcaccataccatatagattatggaggtcttgaaatcagatagagtaattcttctaactttattccttttcaagttgttttggctattctaggccctttgcatttccatataattgctagaatcagcttatttctgtgaaatttctgttgagattttgattgtgattgcattgaatcggttgatcaatttggagagaatcaacatcttaacagtattgtgcctttgcttccatgaacacattgtatatcttttcatttatttaggtcttatttagtttccgttagcagtgttttgtagttaccattgtacagatctttttttttttttttttttttttgagacggagtcttgctgtctcctaggctggagtgcagtggagcgatctcggttcactgcaagctccgcctcactggttcacgccattctcctgcctcagcctccggagtagccgggactacaggtgcccgccaccacgcccggctaattttttgtatttttagtagagacggggtttcaccatgttagccaggatggtctcgatctcctgacctcgtgatctgcccgcgtcggcaaagtgctgggagtgctgggattacaggcgtgagccacagcgcccggcccttttttttttttttttttgtggttttaaggagagagtttaataggcagaaagaaagggagaagacggaagaagctcccccatacagagacagaaggaggggggctccaaaaccaaaagaggaagtccccacctgccacagataccagccaggtatatatgcagcggctggaggaggcagtgtttgatttgcatagggctcgggattggtttgactcaacaaatcattcgcgtagcccgtgaaaaagctgaccctcccaccctggccttttaatatgcaaatgcaggggcgctatgatgttctacacacgtggggatatgtgggggaggccatgttgccaggaacttgtggggaaagggcaagaaggctgaggcaatctccatgtttgggtggacccattttctaatggcctgcatttgcatatcaaaggttgttggcctggctctaagagctgaggctttacgagaaacttttccagagatgctttaaaaaaaaaaaaaacgagcccggcgcggtggctcacccctgtaatgccagcactttgggaggccgaggtgggcggatcacgaggtcaggagatcgagaccatcctggctaacacagtgaaaccccgtctctactaaaaatacaaaaagccaggcgtggtggcctacacctgtagtcccagctactccggaggctgaggcaggagaatggcataaacccgggaggcggagcttgcagtgagccgagatcgcgccactgcactccaggctgggcgatagagcgagcctccgtctcaaaacaaaacaaaaaaccacgaaaacttcccaaggaccccttttcctataacattatcccctgtggagatgccacactaactgttagggggttttgggcgatgactctttctggctacttcctgctgaaaaggggcgtggaatgggaaacagcagctagggctccttctggggttgatccaagggtcttcggaggaatggctggcctgtccatgtgtggttcagtttatggcaccatttggagtttgattgcttctaggcgagaagaaatatttcgagtgatagtattaactatacggggtccaaatattagtacaagacgtataagcaagagagtgcttagtaaaggggttaaccaattccataaagaagactggaatttattaaagaggggttgtagccacttggagctgaatctggcattttccctgagcctgtcaataattttgatttttaagtacctgtagattttcctctactttactagaggtgttaatcccaaagcagcatgtttcgtttaaaactgctttactaaacccaataaaaagtcctagcggactcagcgatagtgaaactttcatgcttcctttttgtcaactattatccctgctataaggataataattaagcaaaatattacagcagtggaaactctctaatatttcagttagaaggtgctaccatgtataaccctattgcaaatagtagagtgaggacagcaattcccacaagtgtggtattttcatagcccatgctaaagcatttacccatagaagaacggttccggttaacttctgaacttaaaatcgccttactaattaagtaccatcttaataggagccagaatagatggcttaaaggaatgtaggaaccgaatggtcattttcctgtcagtgggacaatattgagacaaaaatttgtctacggaagacattttactcctgttaaaagcagaaacttcctgttcccagaagaggcctacagcctgatttctactaggtggcttaggaataccatgtgtttgccagaatgtagagagagagagacatttattgaattactgcctgccgtgattcacaatcttttctaacatacctgtttccctgaactgtaaagactcctgcatgttagacacacggagagagggtaagagaccgaggatagaaagagaaagaaagtttggcgacagggtagctggaagagagccttgaaattaaaggacagatttaaagttgaaatccattccatacccaccactctgatggttgaatttcctttcctggcccatgcaccaaaatgatacggctctaatgagtgggggaacaccagggttcttggtcctcatgccagtttagataaaatgacttgggcacacgtggagtggttttaaggagcagaaggtttaatagataagaagtgaagggacaagtgaagggagaagacagaaagaggaagctccctggtacagagacagagggagggggctccaaagccaaaagaggaggtccccccagtatacagatcttataaagcttctgtcagatttatcagtaagttccatatatatatattttttgagatggagtcttgctctgttgcccaggctggagtgcagtggcacaatctcggctccctgcaacctctgcctcattctcctgctgcagcctccccagtagctgggattacaggcatgtactaccatgtccagctaatttttgtatttctattttattttatttatttatttatttttttcttttttctttttattgatcattcttgggtgtttctcgcagagggggatttggcagggtcacaggacaatagtggagggaaggtcagcagataaacaagtgaacaaaggtctctggttttcctaggcagaggaccctgcggccttccgcagtgtttgtgtccctgggtacttgagattagggagtggtgatgactcttaaggagcatgctgccttcaagcatctgtttaacaaagcacatcttgcaccgcccttaatccattcaaccctgagtggacacagcacatgtttcagagagcacagggttgggggtaaggtcaccgatcaacaggatcccaaggcagaagaatttttcttagtacagaacaaaatgaaaagtctcccatgtctacctctttctacacagacacggcaaccatccgatttctcaatcttttccccacctttcccccctttctattccacaaaaccgccattgtcatcatggcccgttctcaatgagctgttgggtacacctcccagacggggtggtggccgggcagaggggctcctcacttcccaataggggcggccgggcagaggcgcccctcacctcctggacggggcggctggccggacggggggctgaccccccccacctccctcctggacggggcggctggccgggcggggggctgacccccccacctccctcccggacggggcggctggccggacgggggggctgaccccccccacctccctcccggacggggcggctggccgggcggggggctgacccccccacctccatcccggagggggcggctggccgggcggggggctgaccccccccacctccctcccagacggggcggctggccgggcagaggggctcctcacttcccagtaggggcggccgggcagaggtgcccctcacttcccggatggggcggctggccgggcggggggctgacccccccacctccctcccggatggggcggctggccgggcggggggctgacccccccacctccctcccggacaaggtggctgctgggcggagacgctcctcacttcccagacggggtggctgctgggcggaggggctcctcacttctcagacggggcggttgccaggcagagggtctcctcacttctcagacggggtggccgggcagagacgctcctcacatcccggacggggcggcagggcagaggtgctccccacatctcagacgatgggcggccgggcagagacgctcctcacttcccagatgtgatggcggccgggaagaggcgctcctcacttcctagatggcatggtggccgggcagagacgctcctcactttccagactgggcagccaggcagaggggctcctcacatcccagacgatgggcggccaggcggagatgctcctcacttcccagacggggtggcggccgggcagaggctgcaatctcggcactttgggaggccaaggcaggctgctgggaggtggaggttgtagcgagccgagatcacgccactgcactccagcctgggcaccattgagcactgagtgaacgagactccgtctgcaatccctgcacctcgggaggccgaggctggcggatcacttgtggttaggagctggagactagcccggccaacacagcgaaaccccgtctccaccaaaaaaatacgaaaaccagtcaggcgtggtggcacacgcctgcaatcgcaggcacttggcaagctgaggcaggagaatcaggcagggaggttgcagtaagccgagatggcagcagtaccgtccagcttcggctcggcatcagagggagaccgtggaaagagagggagagggagaccatggggagagaggggagaggggaggggagagggagaatttttgtatttttagtagagatagggctttaccatgttggctaggctggtcttgaactcctgacctcaggtgatccacctgcctcggcctcccaaagtgctgggattacaggcatgaaccaccacatccagccagttccatattttttaatgagattataaatagtattggattttagatttcaatttgaataatttattcttagtatatagcaatacagttgatttttgtatttttgcctaatatattataactttgctaaattaattttagtagcttttatgtagtttgcttaggattgtatatataggtgatcatgtctgtgaataaagacagtttaattccttcccttccagtcagcataccttttttttcttgctctattgttatggcgagtacttctagtacattgttgagtagacatctttgttttgttctcagtgttcggggtgaatattaagatgttatgggtctgctgatctgctttgtattagtatagtattgtttctagaatttcatataaatcccatgtaatcataaagtatgttgtgtcagcttcttttttttctttacgtatattttgttgctgttgttgtgtcatacttcttttgcttagtctaattccctgagattcattcatgttgttgcatatatgagttcttattttgtttctgagtatgtatatagtatatagacaatacatatgggcagtttgtttatttaccagttgagcaacatttcttagctattatgaatagagccgctgtgaacatttgaatacaaaccttagcgtgggcagaaggtttcattttcttggacaaatatctaggaggtggaattgctggatcatatggtaaatgtatgtttaactttataaggaactgtaaaactgtttacctgtctgttccattttgtgttctcaccagcagtatagccaaatttcagttttgtaacctcaccaacacttggtattaatattctcctatgttttagccattctggtagatatgtagtggtatcccattgtgattttaatttgaaatgtcattcagcttctttggtgaagtgtctgttcaaatcttttgcctccttttcctttcctttttcttttctcctcccccttctgttttgaaaatcaggttgcttttctgttactgaattcttagaaaaaactgagttcttaggaaaaaaactcatttttttaaatgttctcgatatccatcttttattagatatggtttgcagatattttctcccaggctttgttggtacaattctaattgatcagctgagtctctgtagtaatgctccatttcttggtcatatgtatattttgaggaataacaagtgttttaaagctcaaaataacagttatgctaacatatactataagctgcattctttaatccatatatagggaaagaaaaacctagattgttaatccggaacatttacattcttaaacatagtaaattgtctactgtacttaactatgttaaatacttttaaatggcctagagcttcatctttttatctaataaaaatgaataaataattccttgtctgtttcattatttattattactaactaaaatgaaaaactatgaatatattggtctggtataaacctaatgaaaagttgccaaaataaaaaaacacttaatcttgcctataagcttttgccattgttccctctctaaccctcactgaaaaacccaatctttatggcttacctctattagtatacaatatattacttttgcatcaagtatatacacatactgtcttgtctttttgttctttctatgcgtaactgttctactgacttgaattaggttttgaatgcttgctgtgtaagctgatgagaaaaaaaaatcagctttacaatgtgatatttgtcacatttagcaattatattaaattattgtaacactatattacctaagtatctacctggacacttttttttctttttctttttgaaacggagtttcgcttttgttgcccaggctgaagtgcaatggtgtgatcttagctcactgcaacctccgcttcctgggttcaagcaattcttgtgcctcagcctcccaagtagctggaattacagccaccacgtccagctaattttgtatttttagtagagaagggggtttctccacgttggtcaggctggtctcgaactcccgacctcgggtgatccacccgccttggcctcccagagtgctgggattacaggcgtgagccactgtgcctggctggacacttttttttcttactcagggtgatactcaactcaatttatttatttatttaaaaaaattttttttctttttttttttttgagatggagtttcactctagtcccccaggctggagtgcatctcagcactgcaacctctaccttttgggttcaagcgattctcctgcttcagcctcccaagtagctgggattgcaggcaccaccatgcccagctaatttttgtatttttagtagagatgaggtttcaccatgttggccaggctggtctctaactcctgatctcaggtgatccacccaccttggcctcccaacgtgctaggattacaggcatgagccgccgtgcccagcatctaaaaaacttttttgagacagagtctttgtcgcccaggctggagtgcagtggtgtgatcttggctcactgcagcctccatctcctgggttcaagtgattcttgcgcctcagcctcccgagtagctgggaccacaagcgcatgccaccacacctggctaatttttgtatttttagtagaggtggagttttgccatgttggctgggctggtctcgaactctgacctcaagtgatccaccggctcaacctctcaaagtgttgtgattacaggcgtgagccactgctcctggccttacctcaatttatttaacagtcccctcacccaaatgtgaagatgataaacaattctttcctgtctgaattattctttctctcatgctggaattttggaacattttacaacttacatttaagaaggctagtttaaaaagaaacagtggaaatttccaccttttaaaaaaacttaatttctggtctattaactgctttgcaggaagaaagaaatatgaagaagaaccgcagacattctggatgtcagcctgtgaaattttccactatttcccataataacatgcaggcacgcttatactgctggattcattgcaactgcagttgcactctgagtggaatttgaagctactcttatcagtgataaaatggcatgtagcttttaatgagcagtgcatatattttcacatctaaggtattgtatgtttgtttcatctctgcctgaatagtgtggccataaacactgaaattgtaaaattatttttaaaacttctgattccaaaattcctgattgtttcaaatggttttgattgttttatttcagtagattatgtatctgagaagatatataatcatccttttagttacagtgctgcatacataaaattttacagggttttatacatacagaagaatgatgagaaaattaaagttttaaaaggatttgtatagaggagaaaattgagacaaagttttaaaaagatttgcatagctcagtattttggtttgattcaataaatttttaatgatttaactttttttttttttttttttgagacagagtcttactctgtcacccaggctgtagggccgtggcacgatcttggctcattgcaacctccgcctcctgggttcaagcatttcttctgcctcagcctcccaagtagctgggattacaggctcccgccaccatgcctggcgaatttttgtatttttttagtagagacaaggtttcaccatgttggtcaggctggtctcaaactcttgccctcaagtgatccacctgccttggtctctcaaagtgctgggattacaggcgtgggccactgcgcctggccaacaattttaactattttaggttcctgttaatcttttaaaatgtcagtagactttatattaaaattgatgctgtgtttttgtttggctccttgaaatttaaaggcaaacaaggtgttattatccaacttttctaatgatgtaagtccaggtttcctagatctgtaaactggcgtagcagtagggtgaagagtagattacaaatacattgtaattatctaccctgtttcatctttcatctcttccatggctaatgcctaacattggtattaaggaataaaattgaggaatttggctgggtgcggtggctcacacctgtaatcccagtactttgggagactgagggcaggcagatcacttgaggtaaggagttcaagatcagcctggccaacgtggtgaagccctgtctctactaaaaatacaaaaattaaccgggtttggtggtggtcacttgtaatcccagctactcgggaggctgaggcagaagaatcgcttgaactcaggaggcagaggctgcatgcagtgagccgagattgtgccactgtactccagcctgggcgacggagcgagactatctcaaacaaacaaacaaacaaacaaacaaaaagaaattggggaattcaagatatataaatgaacctttaaactgcacttttgcagagaggaatttaagggttcaaagtgatgaaacagatgtattacagatatctttctgtgtttttacacttgcacatcactgacattttggaagtaaagccatattaatgcagaagtatatctcttctggactgttgggctagatttgagcaagaataatgttgtgacataacagtgttctccatcccttccctgtgatctgctcctcccttgtacagtctcatccttcctcttgacctttcctgtatctataacttttctcttgacctcttcatgcacttccccttctcagctttcctccagtctgcaactgtcttatcccttccctcagcctaaatttccgtctggcttgtaacctttttacctctgtcaactttccatccttcaggtccctcactttttctggtttctcactgttaaccaaggtcttttctttacctttggaagcttctttactgcgtgtgttctctgctcctgtcagattgatttttgtttagtccttgacccctcaaacgtgtacatcctcacaccctccaaaatcctttaactttcatttcttcttccatgctttaatttattctgcaaaaatttattgagtgctagccatgtgttgcctattccttagatgttaggaatataccagtgactagaaaggttacggaaaaaaaataaaactttgtagggggggacttgtgtgtgtgtgtgtgtgtgtgtgtgtgttgcagggtttacgttttagatatcatggtaagttttgctaagtaagtgatacttaaacaaggacaccaggaagtaagtaagccctgagaatattgggttggggtaaggttgggatggggagctttctgtttagagggaactaccagtggaaaggccctttgttaggagcattcttagtgaatttgaagaacagcaaggtgaccagtgttttggagcacagtgtttggaggacagtgaacaaagacgtaagtagcaagagaaatctgagaggtaacagtgaggccttgcagacagttgtaaggacttcaactttaaaaaaaattcattttttaaaaaatagcataatagcatataaatgcatggtttccattattttctttttgagatgggatctcattatattgcccaggcccaggctggtctagaactgctgggctcccacctcagcctcatgggtagcttggcctacaggtgagtgttaagacgtgcagctaattaaaaaaatttttttttcttgtagagacaggtcttttttgctgcctagtctagtcttgaactcctgacatgaagcaatagtcccacctcagcttcccaaagtattggcattataggtgtgagctatcatacctggcttcctgcagattttttaattgtatttttggttattccaaaaagatcatttggctgggcacggtggctcacacctgtaatcccagcactttgggaggctgaggcgggcggatcacttgaggtcagaagtttgagaccagcctggccaacatggtgaaaccccgtctgtactacaaatacaaaaaaattagccacacgtggtggcgggcgcctgtaatcccagctactcgggaggctgaggcagagaattgcttgaatctgggagacggaggttgcagtgagccaggattgtgccattgcactccagcttgggcaacagagcaagactctgtctcaaaaaaaaaaaaaaaaaaaaaaaaaaaaattaaccgggcgtggtggcaggcacctctgtaatcccagctactcaggaggctgaggcaggagaatcatttgaatttgggaggcggaggttgcagtgagctgagaacacaccactgcattccagtctaggtgacagagccaggttccgtctcaaaaaaaaaaaaaaaaaaaagatcattgatttttttttttctttttccccttcaaattaaagcatttcttttttctttggttgtaaaggtgattaattcatgttcatgtggaaaacatggaaaatccagaaaagtacaaaaaaataaggattactagcaaccgcatcatccattattaatagattttgtatgtatatctttccagtctttttttctttgttcttttacacatacacagtgccttatacagtatatgggtttagcagagattaaatgaactctatcagggtcttcataagaccctccagcagtcatgtgaagagtagcctgtaagagtgcaagggtagaagcagggagagctaggccaggtgcactggctcacacttgtaaccctagcactttgagaggtcgaggagggtggatttcttgagcccaggagtttgagaccagcctgagcaacatagatcctatctctacaaaaaatgcagaaattagcccagcatggtggcaggtgcctgtggtcctagcttactggggaggctgagctgggaggattgcttgaacccaggaggttgaggctgccgtgagctgtggctatgccactgtactccagcctgggcaacagagcaagaccctgtctccaaaaacaaaaacaaacgaaaaaacaaaacacaaaaaacccaggatgacctattagaaggctgttagagtaatccatgttggtttagactatgattatggcaagagaggtgataagaagtggtcagattgtatatatcttcttttgaaggtagagccaacaggattttgtgatggtttcagtggggggggcggggggtgaagagggaagagaagaatcaagcataattcaaaagtttttggcttgaacaactagaattgtttggcttcattttcttgtcaaactacccatccaaggctcttttattgtgtccttcctgtccatttgaacttgggattctttaaaaaaaaaaaaaaaaagatttatttgctctatagagaaaccaaagcatgaacttgtgattatttctttcaccaggcttctagtttgtgctgtccaacttggtacttggtacccaccacaagatgctatatataacaagtgtttcactagcattagtctccctaactgggttgtgagcatccttttactggatcatgctgaatttgagtcttttcagggacctgtaactttctgagtacgttgtggacgttcagaaaatgtctatttattgtatgtttttcaggcttaagaataagatatgaaaaaacctcaaagtaactgtctgcttttactttagattactgacatcttttgagaatgtgtttgggccagatgagctggttcacacctgtaaccccagcactttgggaggctgaggcaggcagatcacttgagcttaggagttcaagagcagtctgggcaacgtggcgaaaccccatctctaccaaaaatccaaaaaattgtctgggtgtggtggcgtgcacctgtagtcccagctgttgggtggctgaggtgggaggatcggttgagcctgggaaatggaagttgcagtgagtagagatcatgccattgcactatagcgtgggtgacagagtgagactccatctctctcttttttttttcttaatttataaaaaaaggtgtttggatagttattttccttatatccagtgtaagaatcattacaaggtctggctgtgttgcccaggcttgtttttttttttttctttttaaataattagcgttattattattcttagtttttgagtcagggtcttgctttcttgccagacttgagtgcagtagtgcagtggcacaatcatggctcactgcagcctcaaactcctgggctcaaggaattttcccacctcagcctcctaagtagctaggctcacttcttccgtgcctcgctgcccaaacccctagggggagcatgcagacggacaggtcgtgaggagtgtttttgggctttgactccatagcagcatctagggttgagtgtttccagctcctgaagccccagtggccgtgtgttacagtgtgctctttcagttttgtggtctacaggtggcttgtgccaatcagctgagttacactctctgccttatcgcaaggatagagggctctctgtatcccaggttcttgccctagtgtgctggaaagatcggatcacacacggacttggagaatgagtgcaaggtttttttgctttttttttttgagaccgagtctcactctgttgccaggctggggtgcagtggcgcaatctcggctcactgcagcctcctcctcccaggttcaagtgactctcctgcctcagcctcccgagtagctgggattacaggcatgcaccaccacatctggctaatttttgtatttttaatagagatgaggtttcaccatgttggccaagatggtcttgatctcctgaccttgtgatccgcccatctcagcctcccaaagtgctgggattacaggtatgagccactgcgcccggccgagtgcaaggttttattgaatggtggaagtagctctcagcagatggatggggagccataagagggatggagagggaaggtgatcttcccctggagctgggctgcccagcagctggactctactccgaccaccccctatcaaattctgcatcaacttaaatgtagatggctggctggcgctgctggtgtctgtcagtgtgctgttctgctcctctgttcctctcgatgtccagccgcttgtgtgtgtgtctgcttaaggtcctgggcttatatgagcacaagataggggggcatggcaggccaaaaggcaactttttgggtgcgtaaacagaaatgcttgttctcacttaggtccgtgagcacaggcccgagggtggagcactcaccatgtaccctactcatctctacccagcacttacttccctgcccttctcccatatcaagactacaggtgtgcacctacatgcccagctaatatgataaaatttttttgtagagagtgtcttgccacattgtccacacctcaagtgatcctccttccttggcctcccaaagtgttggaattactggcatgagccccctatccggccagtgaatgttaatgcttacctggtatatgcaaagcatcctaggagatagaaagttttgcaagaaaaggtccctgcccaaaaaggagcttattttttggtgcagacaatatatcctatacacattttgtctcctttacaggaaaataatgtattatcatttactgcaaaacaaattgttgtcatgcctttgtcattctaaagcttgtaggggctctttgcctctttattaagtgatgattgatatctgtgctttgagttcttatttatttgtttttaaaatagagatgagtctcactttgttgcccaggctgatcccaaactcctggtttcaagccatcctcctgcatgggcctcctaaaatgctgggattacaggtatgaagccattgtgcccagcctcactgtttttttcttttttttttttttttttgagacagtcttgctttttcactcaggctggagtgcagtagtgcaatctcggctcactgcaacctccgcctcctggattcaagcaattctcctgcctcagcctcctgagtagctgggattacaggtgtgcgccaccatgcccggctaattttttttttttgtatttttagtagagacggggtttcaccatgttggtcaggctggtctcaaactcctgaccttgtgatccatccacctcggcctcctaaagtgctgggattacaggcgtgagccaccgcgcccggcctgttttgttttaagcaaagaagttcttcatatttatagatgctgtctggtttagaggatatgctatctatccatatacaactgagttctctacatttccttggtctggaagggactaaatcttttagacaaggagaaggaaagttggtaaaagtagtgcttttcagttacgttctttacttgtagcgttgtaaagaacttatcagagaagtaaattgagtgtaatttacttttgcctgtggtcatcacttctacctcttaatggagtgtttttctatagaaaggttatagaatgtaactcaaacttttatttttgtgataatcggcgggggtgggggggggaagtgttgggaaaacaggtgtgagccattgcacctgttctattttatattctgctaggaaagaaaatgtaaaactgccaaattagctagttcaacaaatgaccacctataaaaaccaaggggtttacatagggttttttttttttttgagatggagtcttgctctgtcgcccaagctggagtgcaggtggcacgatctcagctcactggaacctctgcctcccaggttcaagtgattctcctgcctcagcctcctgagtatctgggactacaggtccttgtcaccacacccggctaattttttctacttttagtagagattgggtttcactgtgttagccaggatggtcttgatctcctgacctggttgtgatctgcccgcctcggcctcccaaagtgctaggattacaggcatgagccactgtgcctggctgtttgtttgtttgtttgagacagagctttgctctttctcctaggctggagtgaagtggctcaatcttggcttactgcaacctccacctcctgggttcaagtgattctcctgtctcagcttcctgagtatctgggattacaggtgcctgccaccatgcctggctaatttttgtatttttagtagagacagggtttcactatgttggccaggctggtcttgaactcctgacttcaggtgatccacccaccttggcctcccaaagtgctaggattacaggcatgaaccaccgcgcctggactaataggtttttaagctctaactttgggggaaaaaaacccaagatgattaaaaatgtcccatttagatgatctttagttgacttgacacaagtcttttggtctggactgctatagtaattcacgatgtggtttttttaggcactgcgttagaagcgaagaataatattaatttatttggggtagagagtagtggtgaacctgacttgtaacattctgtttaagagagtctgatgttccagtctgtaactgcaattggaagagctttggaaaaatgatttgtggacacataagatactttttaaaaacataattttctctgcctccttaaagaagtttgtgtttcttaaataaccagcattattactattcttttttttttttcttgagacacctgtcacccaggctagagtgcagtggtgtgacctcagctcactgcaacctctgcctcccgggttcaagtaattctcctgcctcagcctcctgagtagctgggattacaagattacaggcgtgtgccaccatgccagtctaatttttgtaattttagtagagacagggtttccccatgttggccaggctggtctcgaactcctgacctcatgatcctcccaccttggcctcccaaagtgttgggatttcaggcgtaagccactgtgcccagccactattcttctctttcagatgaatctaaaagatgtttagttttcagaaactggagaagatgttatattctcacttttccctgttaagtttcagcatctgttctggctgttttactttttctcaaaccttttatttagaacaaaaacttggatgaattgatttcaagacttcactttgcctttgggtaaggttttccttagtggtttgcctgagttgtgttttagtatctttcttgggttgcttagctttttcagcctttgggacaatctgttgacttagttgtgaattttagcttttcatttcttgtgccatagaatttgtatgtgctgccaggcatggtggcatgttcctgtagtcccagctacttgataaggtggcttgataagctacttgataaggtggtaggaggtagcttgatcccaagagtttgaggctgcagtgagctctggtcataccatcgtactatatgtagcctgggtgacaacgataccctgtctccaggaaaaaataaaataaaagttatgctaatagaacataaactatttgaggactgggaggtatctgttttgtttactgctatatccttagtgctcagaatggtggcagacacatagtaggtactcaaatatttgctgaataaatttagagtagcagtagcaggtttttatttattgagcacacactgaatggcaaagtgctaagctctttgaatggatttggtggtttttccattttatagcttgttttctgttcatatgatagtttatgaatgggtgtgagggaggaaggaggagatgaagccagcgttgttgaggatgctgctagctattaccaaatttcatcaagtttaagataccatcaattatagaacacaacattattttacgtattactaggtctcaaactcctggcctcaagtgatccgcctgccttggccccccaaagtgttgggattacaggtgtgagccaccgcacccggcctattttatgtactactgggaaagaaaatgtaaaactttcaaataaataattggatactgccaataacatgacatattctgattttaaagatgtaaaaatatgaacaaaccccaaaatatttaagggatactagttttacataaactctcatttaacaatcatgaaaccttctagagttggatattactatcttcatttgagagaggaggaaattgaagctcatgggttaattacataagctctccagtagaggatccagattgaggtctctcagatttcggaggccatgccctttttaccaccctacattgccttaggagtcaaggaaataaaatagtacattggcctgtatgtcaactttggcttgaagatagtcaactttggcttggagatacttagttggcatggctttaaacattttctttgaaatggatttttcctatttttccttaaaatcaaatatcttggctggggcgcggtggcttacacttgtaatcccagcactttgggaggccgatgagggtggatcatctgaggtcaggagttcgagaccagcctggctaacatagtgaaacccccctctactaaaaatacaaaaattagctgggcatggtggtgggtgcctgtaatccggctacttgagaggctgaggaaggagaatcggttgaacctaggaggtggagtttgcagtgagctgagaccgcaggattgtactgcagcctgggcaacaagagtgaaactcttgtctcaaaaaaaaaaaaaaaattcaaatatctttgtatttactctgtgctagctactctgtgggtctgtgtgtatacaaaacaatataaggtcttatctcttcttctcaaggaatttatagtctgtttggggagatgagaactaaacatgaaagataactagagaagatttaaataacatttcagagaataatgcaagaggtttaacaaggcagtgaaggattaattgccaaataaattgtacaaataattgcttttggagttcagaggaagaaatgattgtttggggctggggtaatctagggaaggatgtaaatgaattcctgggagatattttcagttagtgagattatttactttacctttaaaatcatattaatgtttgttacaaatggaactgcaaactgtttgaacatgaactattgtatcttaatttttttaaatctccatatgagagtgcaggagctactaccccagagaaaagtagatcatgctttctacatgtatttgcttctattgtatcaagtagatggagaaagtactcagttttagaagaaaaatctttgggtgaaaaaaaagaggaactccctgtccctaaattccttcaatgtcactcttgccacgttttcaatcagttgtactttgtgagtcattgccgaggtcactttttgtgacttgtagcattcatgattaacttctaaagggtggaaacaagcattaatcccctttacatcactaatgttctctctgtcccccctccccctcctttccccactctcccctcccccctcccctcccctcccctcccctcccctcccctcccctcccctcccctcccctcccctcccccctcccctcccctctcccctcccctcctttctcctcccttcccctctctctcctcaggctcaaaggatcctcccacctcagtctcctgagtagttgggaccacaggtgtgtgtcactgtgcccgtttaatttttaaatttttttgtagagatggggcctttctatgttgttgctcaggctggtctcgaactcctggcctcaagttaccctcctgccctcaagttaccctcctgccttgcaaggcctcccaaagtactgggattccaggcaatactccttcataccgttttgaagcaaatactagacattatataatttccttaagtatctataaaagatacaactgtctttcataaaaagcaaactctacattattacatctagaaaacctgcattaatttcttagtagcatcaaatacacagtcacttcagttttctagttctcctcattttttaatttgttggaatcagattcaaacaagatgcagacattgcaatttggtttttatgcgacctaagtttctgttaatataggttttctcttcatctcttttttccttccaatttatcaaattattttttgccctgtagagtttttttttttttttttttttgttgttgttgttgttggagggacagagacttattctgtcacccaggctggagtgcaatgctgtgatcatagcttattgtagtctcaaactcgttggctcaagcgatcctcccacctcagcctcccaagtagctgggattaaaggtgcacaccaccatgccagctacattaaaatttttttttttttttggtggaaaaggggctcttgctatgttactcaggctggtctggaactcctggcctcaagtgattgtcctgtcttggcctcctaaagtgctgggattacaggcacaagtaaccgtgcccggcttcctgtagagtttcttattgtctggattttgcaaagtatgtctttgtggtggtttttcagtgtgtcctctgtcctctctctctctatttttaaaatggtagttagctttcaagtcttgatcagtttctggttcagttattttttacaagcatattcattatctgttgctgtgtaacaaattatctccaaacttgacatcttaaaccagcatttattggtcccagcacctcaggaaactgaggtgggaggactgcttaagcctggaagtttgaggctgcagtgagctgtgattgcacctgtgaataggcaattcctaggcaagaccctctctctaaaaattggccaggcatggtggctcatgcctatagtcccagcgctttgggaagcccaggcgggtggatcatttgagccccggagtttgagaccagcctgggcaacatggcgaaaccccatctatacaaacaatacaaaaattatccgggcatggtggcacatacctgttgtcccagctacttgggaggctgaggcaggagggaggatgtcttgagctgggacgtggaggttgcagttggctgagaacacaccactgtactccagtctgggtgacagcaagactctgtttcaaaacaaagcaaaataaacctcccaaactccttagtatttattatcttccacagtttctgaaggttaggactctgggagtagcctagctggggagttgtggttttagtactcttaatgggttgcagtcatctgaaggtttaacaaaggctggaggatttgcttccgaggtggcttactcagtgaccattggtgggaggtctcagtttctgcctgagtgtcctaaagctactgccagagctagtgatcagagagaaggagaaaaggaggagggaatttgaaatgcctttgtgacctcagaagtgacagcttgtcacttttcttttggtcacatagaccaactttgatacagtatgggaggggactgcttaagttcatgaatacctagagatgggtgtcactggggatgtcatcttggtgctggctactacagtgagactacttcccagggagtgtggtttatcagaagacacatgacgtctgtttttctttgagttgttaatattagcagatactataaagaaaaactttttctttctttcttcttcttcttttttttttttcctttggagagagtcttgctctgttgcccaggctggagtgcaatggtgggatctcggctcaccgcaacctccacctcctgggttcaagtgattctcctgcctcagcctcccgagtagctgggactactggtgcgcaccaccacgcctggctcagttttgtgcttttagtgtagacggggtttcaccatgttggccaggctggtctcgaattcctgacctcaggtgatccacctgccttgtcctcccagggagctgggattacaggcgtgagccactgtgcccagccaagaaaagctttttctaatcaagtatttggtcacctggtgtgggtacagtttacataggaaagatgtgatatatgttagactctatttactagtatttaaaataacaagttggtttactagtattctcctgtggtaaaaaacattttttttctcaaagtttaaaaaaaaactattttgaaataattttagacttttgggaatgttgcaaaaatagtagagttttcctgtgtactccaccccgattcccccaatttaataacttgcatagccatgttatagtgatcaaaactaaggctaacactggtataatactgttaactaagtagcagatattgtcaaatttccactcttgtgtttttttctgttccaggatccaatcctattctttattaatctctcccttttgtttttttggggtttattttgttcaagtttttttttttcagttaggtgtaggatggatgttcatgataatgtatctttatttgtcttttatttaatactactttttttttttttttttttttcccttaaacgcagggtctcactgtcacccaggctggaatgcagttgtgctgacatggttcactgcagcctcaacctcctgggtttaagcggtccttctgtgtagctgggaccacaggcatgtgtcagcatgcctgactaattgttgtgggtatttaaaaaaatttatgaagtttgtattttgttttagatgttgcctttatattaaaatccttatgtaatagacttagtgcccccccaattttttggttattttctgttggtttcttactttgaatactattgaaattacctagtaacttctttttcttcccaagcatttgatttaaagtaatatctttttctttcagttgatatcaggtaatcagccagttttttttccagtttttatctcttcatacttcagtttatggatagttgtgctctagctacaatgttggaacatatagtcattatgtagtataaagtgtcacttagaaccctcattcaggtttttacagataaatatatatttaatgcccactaccatttttatgttgatatggactttccagttatttgggtcatctggaattcattttctctaataaattcctcaggaagagcttatgggaacagtattccttgtgttcccctatgtttgagaagtttgtctgcagctttaatagttaaaagctggcttggtgatgataaaattctgttccacagtatctgaaatatgtcattccactgtcttctggcacagagcatagctgttacagtatgatgatgtcgacctgtttttctttgagcaatgtagctttttttttttttttgtaattgtttagatatccataggattttttttttttttttttttgagaaagagtctcactttgttgcccaggctagagtgcagtgacaggatctcggctcactgcaacctctgtcttccgggttcaagggattctcctgcctcagcctccctagtagctggaactacaggcatgtactaccacgcccagctaatttttgtatttttagtagagatagggttttgccatgttgtctaggctgatctcgaattcctgacctcaggtgatccacctgctttggcctcccaaagtgctgggattactggcgtgagccactgcgcctggcctttgtaatcttattggtgttggttggtctgacacatttttccttgggcattcagtgagtcttttcaatatgtattaatagtttcaagcttccttcccctcttctttttttgtctctgtttttctcaatatcatgaaggttttcttagtgctgttttttttttatttgctttttgttttttttgtcttactgccttggttttcttctttgggattcctactatacatatattggatcatctttgtgatatatatatggagacacggtctcggtctgtcgcctaggctgaagtgcagtggtgtgatcatggctcattgcaacctccacctcctgggctcaagcgatcctcctgcctcagcatcctgaatagctaggactataggggcatgccatcatgcctggttaatttttgtattttttatagtgatggggttttgccatgttgcccaggctggtctagaactcctgagctcaagtgatcctcccacctcaaccttccaaagtgttgggattacaggcatgagccactgtgccaggcctgtatattgtttatgtgagataaacctctcttttgtttcctcacttgtatatccaactgtcctctgaaccttttcatttagatttctaatggacaactgaaactcaacatgtcccaaaccaatctcatcattttccctgtaagatcttcactaaagccttttctttctcattgttggtaattcattcttgctgttgcttaggcttaaaaaccttgactactcttttatctccttgctatttttaagatatatgtagtgtctggccacatctcagtaattccattgaaccaacattttctgtgagttattgtaataacatcctaataagtcttcctgcattttactcttgtttccttgtatcctgttagtaacgtaacagctggagggatcttttacaatcctaaaccggtttgtcattcctctcttctagactatgtagaggtttcttatttcacccggagtagaaatgaaagttcttactttgtttcaatgagactctgtgacttgcctctgtttttttttttttttttttttaagaccgaatttccctcttgttgcctaggctgaagtgcagtggcgcagtcttggctcactgcaacctccgcctcccgcattcaagtgattcttctgcctcagcctctcgagttgctgggattacaggcatgtgctaccacgcccagctaattttgtatttttagtagagatggggtttctccatgttggtcaggctggtcttgaactccctaactcaggtgatcttcccgccctggcctcccaaagtgctgaggttacaggcatgagccaccgctaccggcctgcctctgttacatctctgatctcacctatcattcctgtcttccttgttcattcttgatccagtaccgttcttcatccagtgcaggcacattcttgcctttgggtatgccctttcttggaatgtttctgtcatatgtctgattaagttcctcatctctttaaagtctcaattcttacactcttaatgaggcccacccttaccaccctatttaataccggaacctctgaccttatagcactaatgctctaatatattaatactttacttatttattgtgtttaattataaagcatatgctccacaagaacaagaatcctagtccccattgctcactgacatatctcaaacacttaggtaggtgtctggcatatggtagatgttcatcattcatttgtcgagtgaataaacacactctgtatttccttgaaagggtgacgtcctaaagcccttctcttaccccatctgtggcgttaagatgtttttctgggtcacagcatatcgtttctctttaaaccctgtggtgggagtactttaggaaagttcctagtttttgttgattttattttatttttatattattattattattattattattttagacggagtctcgctctgccacccaggctagagtgcagtggtgcgatctcggcttactgcaagctccacctcccgggttcacaccattctcctgcctcagcctcctgagtagctgggactacaggcgcccatcaccatgcccgactaattttttgtgtgtgtgtttttagtagagacagggtttcaccacattagccaggatagtctcgatctcctgacctcgtgatccacccgcctcggcctcccaaagtgctgggattacaggcatgagccaccgcgcccggcccgttttgttattttttgagatggagtgtcgctctgtcacccagactgaagtgcagtggcatgatctcagctcactgcaacctccacctcctgggttcaagcgattgtcgtgccttagcctcccgagtagctaggattacaggcgcctgccaccaccccctgctaattattttattttattttatttttatttttaataaagatggggtttaccaagttggccaggctggtcttgaactcctgacctcaggttatccacctgcctcgacctcccaaagtgctgggattataggtgtgagccaccatgctcagcctttgttggttttattttagcttcccgtctctttaggctggaactgtttctagaaatccatttaagatggaagttgactctgaaattggttaaataaagttagggtgatttgttaatatagaggaattgtgagttaccacctgtcatatatataagagaatttcttatttgttttcttactctctaagcctaataaaaaaaggttcctttaaaaaaaaaaaattcattctaggccaggtgcggtggcccacacctgtaatcccagcactttgggaggttgaggcaggcagatcacctgaggtcaggagttccagaccagccagcccaacatggcgaaaccccgtctctactaaaaatacaaaaaattagctgggcatggtggcaggcgcctgtaatctcagctactcgggaggctgaggcaggagaatcacttgaacctgggaggcagaggttggagtgagctgagatcatgccactgcactccagcctgggtggcaagagtgaaactccatctcaaaaaataaaataaaataaaaataaaaattaaaaaaaaatcttttttactgcattttcagtggcagtttgagaagaaggggtggtacatgtcgatagacattaacatgcaattgagaaatgcttttaaaaaagtgtgcatgtatattatgccttctcaatgtttttattctgtttcagcaaatcagtagagttgcagtaatctagaaaggattaattatgtcatgatggtttactgtgtagtctccccaagaagggccactctgttctgcgtactgctgttaggcacaagatgtgaaataatatctgtgaggtcttcatttggtgaatatgataaaatcaatagcattttaaagggtctcctaaaaataccatttaatgaattttaaaaattaatagtgaattattattattgagaacatttgttaaattagtgttttcttggtttggattggatgtaatgcataaacttcaaagatgtaaaaactgtatttaaaacattttttaaattttttgtagagatgggggtctcaccacgttgcctagggtggtctcgagctcttgggctcaagtgatcctcccacctcagcctccaaaagtgttagattacagtcctgagccatcatggacttaactatccttaattttgtatcacctatggagaacatgtattaactttgtaataaaaaagtttttaggcctggtgcagcagctcttgcctgtaatgccagcacattgggaggctgaggtgagaggatcacttaagcccaggagtttgaggccagcctgggcaacatggcaagaccccagattgacaaaaaattaaaaaaaaaaattagctgggcatgatgtggttaaaaaaaaatttatctgggcacaggatgacaggtacctgcggtcccagctacccggaaggctgagacatggcaatcacttgagaccaggaggttgaggctacagcaaactatgatctgtctgctgcactccatcctgggcaacagagcgaagactctgtctcaaaaaaaaaaaaaaaaaaaaagtcttctgtattttgtataaattggtggtggttggatctagaggcttgagcacagatgatttaatgagatcagtttccaggtttgcagattcacaaacctttgttctcttaaattcttcttctttcttctcttttttggggacagagtcttcctctgtcaccaggctggagtgtagtggcacaatcaaggcttattgcagcctctacctcccaggctcaagaaatcctcccaccttagcttcttaaatagctgggactacaggcgcacgccaccaccatgcctggctaatttttgtaattttttgtagagacatgatttcaccatgttgcttaggctggtctcaaactcctgagctcaagcagtctgcctacctgggcctcccagagtgctgggattacaggcgtgagccactgtgctggctgttcttttaactttttaagttggcctgagaaagcttgcagagccttattctccagatgtctctttttacaattattcttctaactgccaaaagaagtaagaagtctcccgttttactgtgttgtatttcaatttttttttttttttaaaagggtttgaagtccaggcgcggtggctcacacctgtaatcccggcactttgggaggccgaggtgggcaaatgacctgaggttgggagtttgagaccaacctgaccaacatggagaaaccccatctctactaaaaatacaaaattagtcgggcatggaggcacatgcctgtaatctcagctactcgggaggctgaggcaggagaattgcttgaatccgggaggcagaggttgctgtgagctgagatcgtgccattgcactccagcctgggcaacaagagcaaaactccgtctcagaaaaaaaaaaaaaaaaaaggtgggggggtttgaaacacatgggcaattagaaatactggtgtcagagtttaacaagtgaatgactctcaatgactgattaacaaacgacctattagttggtttctaagtgtgttttcatcagaattgaggtggaagttaatcaaattgctctctgagagatcatgaaaacataatttttgatggtagttcactgagactcttatcatgtaattaagattatactgaaagaattgaatgacatcgctttcacataactccttccatgtatttaatctacttatgtcagcacattttaatcttacaaaaaatgagtgcatgtcagtggtgggagaaggacaaaacatcttgctcattgtagcgaacagattcactgacagtgaaaagtgtatttttatgtatatattacccaaatttgtaatatgtttatgttttgaacaattacatcctaataatgatcatagtaactcagaataagatgtttttcaatacttagaccttatgatcagatggaatttaattatttcagtttatatatcttttttcagatataggataataaaatacattcaagcataaaatggcatttcctcatgattaaattctggggaagaagaacggaaattttatatttcaggagaaaggaagagttgtagaatttctgacttggagatgatctaggttcttttcaatatgtaagagtgatataacaccttattaaaatgctaatgctcataatatcttggaagtgactacttcgtaactaaattgatgaaaaatttaaatgtcaacttgcaaatgttctggggcccatagtttttcaagaatcttctggtaggtacttgagcaaaaacattcaagtcctttggtacctgtttgttgtcaggctccgtgctggctgtgttggtgatgtaatgacacgttccctgaattgacacattcccatctttcaagcagtagactttctacaacaaccaacttaatttatgtctgaagcaaagacgtataactgtacacactaaagatctttacatttcgtgtttttataaacagaattacaaatgcatattttgtatttgaaattttaagacccctcacctccaggatgtgtgtgtgtttctttatgaaagtgcaggctggaagataaattttcttactaagatgaatgtttctttttgacagtgattaaaagatgattaaaatagtggtgattctgttgaaaaattttaaacatgtattttttaaaaatggaaaaacattatttgtgtatgccatagcaatttattttgcccacgtaggaaacagaaagggaaaagaagaatttttatatggttcaatattttactgttaagataacttaatacgtatgtatccttccatgaggaataaataggaaggctaaaatagaaaggttaatgtaaacattttttaaaagtaaattgttaggttttaaaaaaactttaattttactgttgttttttgggctttaaggaagctctgtatctctaggtttttaaatcctaatgtaccaggttggcccttttgctgaggatgaggcacttctgtggcagtgttgccatggtgactgcttgccaagtgctgtctcaaggtcactcatcactcatagccctgaatacttggattttgttaagggaaaatatcaacactcagttgataaaatgaagttaattatcatatcacattactgaagcatatctagcaaagttatacttataaacagcattttgtgttagtattgatgaactgtatgtttttgaatattgagttttaacctgccagattagaaggccaatggaaaatctataaattagccatagcccatattgtaatactttaattttattccatttctgactttaaaaaatgcagcagcgtaattttactgtggttatgtttgaagatatctaaacatatttccctcaatatttgctttttgatatgaggcaagagcaaagatttcttagcatttattttatattttggtaaacttagcttgaagttgccagttgctgaagcccttgtccatataagaacaggatgatcattatattttccccaaaccagattgcaggtagatagtagatctatctacctaggttctatttcatatattctttgtctcatactgctgttaattttccttgtccttactttgtaggttttaattttttttgttatatacgaacattatacaagaaaagctgttcattaaaggtttttgttgtttttatcaaaccagttttcaataaaggaatatatgaaaagaaattcccctttgcattagcctatatttcatctgggtcttgttctagagagaaaatcagagctatgtgtcttcattaggatgaaaggtgactttgaaatcagagatgagaagcattactgtaaaagggaaaaatgtgattgaaacaaacaaaaacatgcttttcaaaatacatggttagatttttttttttttttttaagacagggttttgctctgtcacccaggctggatggagtacagtggtacgatcttggttcactgtaaagtctgcctccagggctcaagggatcctcccacctcagcctcccgggtagctgggactacaagcacacaccaccatgtccagctaattttcgtatttttatgtagagacggggtttcgccatgttgctcagtctggtcttgaattcctgggcttaagggatttgctcgctttggcctcctgaagtgttaggattacaggcgtgagccaccgtgcctggcctgaaaatctggtcttttggctaattagaatctaactagttcctctgctttcaagggaattggatgaattggttctcctaaagcattttcatctctgcttctgtagagcagacacctttgcagtgtccgatcaagatacttttacactcttgaaaattttttttttaaattattattattatactttaagttttagggtacatgtgcacaatgtgcaggtttgttacatatgtatacatgtgccatgctggtgtgctgcacccattaacttgtcatttagcattaggtatatcacctaatgctatccctccccccctccccccacccacaacagtccccggtgtgtgatgttccccttcctgtgtccatgtgttctcattgttcaattcccacctatgagtgagaacatgcggtgtttggttttttgtccttgcgatagtttgttgagaatgatggtttccagcttcattcatgtccctacaaaggacatgaactcatcattttttatggctgcatagtattccatggtgtatatgtgccatgttttcttaatccagtctgtcactgttggacatttgggttggttccaagtctttgctattgtgaatagtgccgcaataaacatatgtgtgcatgtgtctttatagcagcatgatttataatcctttgggtatatgcccagtaatgggatggctgggtcaaatggtatttctagttctagatccctgaggaatcgccacaccgacttccacaatggttgaactagtttacagtcccaccaacagtgtaaaagtgttcctatttctccacatcctctccagcacctgttgtttcgtgactttttaatgactgccattctaactggtgtgagatggtatctcattgtggttttgatttgcatttctctgatggccagtgatgacgagcattttttcatgtgttttttggctgcataaatgtcttcttttgagaagtgtctgtttatatccttcgcccactttttgatggggttgtttgtttttttcttgtaaatttgtttgagttcattgtagattctggatattagccctttgtcagatgagtaggttgcaaaaattttctcccattctgtaggttgcctgttcactctgatggtggtttcttttgctgtgcagaagctctttagtttaattagatctcatttgtcaattttggcttttgttgccattgcttttggtgtttagacatgaagtccttgcccaaaatctccttaagctgataagcacttcagcaaagtctcaggatacaaaatcaatgtgcaaaaatcacaagcattcttatacaccaataacagacaaacaaagagccaaatcatgagtgaactcccattcataattgcttcaaagagaataaaatacctaggaatccaacttacaagggatgtgaaagacctcttcaaggagagctacaaaccactgctcaatgaaataaaagaggatacaaacaaatggaagaacgttccatgctcgtgggtaggaagaatcaatatcgtgaaaaaggccatactgcccaaggtaatttatagattcaatgccatccccatcgagctaccaatgactttcttcacagaattggaaaaaactactttaaagttcatatggaaccaaaaaggagcccacattgccaagtcaatcctaagccaaaagaacaaagctggaggcatcacgctacctgacttcaaactatactacaaggctacagtaaccaaaacagcatggtactggtaccaaaacagagatatagaccaatggaacagaacagagccctcagaaataatgctgcatatctacaagtatctgatctttgacaaagctgacaaaaacaagcaatggggaaaggattccctatttacactcttgaaatttcaatgaatgcaaagctctatagatattgttgcaaatatgccaggtagtatatatatgccagctaacgtttgtttcatttttgcatatttatgaagccaagtatattatctgatgctatatttgctaatttatttggaaaaaggtgttaatataaaactctgtaagctatgatgttaggcaacatgatctagaaaaaagaatattggagtgggaggccagggccctgcactgatcttccatctttcttttactgtgtgaacttggttaagtcacttgttgtggttcgtgtttctcatttgtaaatcaaggtatttccatttctgttgtgaccatccataattccattgtcagtattctgtgtagtaaaatttggattatcttcaataatggggagaattgtagttcataccaatctaaagtgctgaagctttcaaactgattcctttgattttggatgcagatttattttgtttttccttagatactattaaagtgttttttttttttttttttttttttgggacagagtctcgccctgtcgcccaggctggagtgcagttgcactatctcggttcactgcaagctccgcctcccaggttcatgccattctcctgcctcagcctcccgagtagctgggactataggcgcctgccaccatgcccggctgattttttttttgtatttttagtagagatggggtttcaccatgttagccaggatggtctcgatctcctgacctcatgatccgccagcctcggcctcccaaagtgctgggattacaggcgtgagccactgcacccagcctttttttttttttttttctgaggcagagtcttcctctgttgtccaggcaatggtgtgatcttggctcactgcaatctctgcctcccggattcaagcaattctcctgcctcagccccctgggtagctgggactacaggcatgtgccaccatgcctggctaattttcgtatttttattggagacagggtttcaccatgttggccaggctggtctcgaactcttgagctcaagcattccacccgccttggcctcccaaagtgctgggattagaggcatgagccactgtgccaagcctattaaagttattttgtattccacatgtatatttaaccaggttgttttggaacaagaaggggaagagtttttatgatggaactgtttatgtggcaagtaattagcagtttttaaaatgttttgtgactaactccacaaggttagaattgactgtagaaatagctgctgaaagaatatagagtagaaattgattttgcaatattttgaacctgggcttcaagtagactctggactttttcagtgagaaggaagggttaatgtgcaaaatattttgctttgaagttttcttttcccctttttttgtttgagatggggtctcactctgtcacccaggctgtagtacagtggtgtgatctcagctcactgcaacctccgcctcctgggtgcaagtgattctcctgtctcagcctgctgagaaactgggatcacaggcgcctgccaccatgcctgactaattttttgtatttttaatagagatggggtttcatcatgttggccaggctggtgaagctttctttaacatgtcccattctatagcccaggaaagcattacagtctcaaaagatggtggacatcaatgtttattaaaacattgtttttaaaagtttacaaagtagaatatatgtgaaaagtgaaagctttagaattaaatcctttcatacccatttccgtgcatatataaacacacagtttttactttgttggctcaccttgtacttactctgccattgccatctttttgtcagtatatagagatctttttcatttaaaaaataatggcaaatatgaatctgtggatagtctaataataaaccagctatttgctgttaaaacagtgccacaaagaacatcctttttctcccatctttacccactcctgcagaaatttccatagaacggattcctgaaagtcaaattttttgggtctgtggatgtccaagggatatctttcatatttggctggatttcaaaattgcttttcagaaagctttaatagcttacagtcctgtcaacagtaacacctacttttttcatgcctattttcttgggatgatgatcttatagcagccatttattgagtgcccaccatgtgttaggaattgtgtcaggtgcttaacttggctttctctaatcctgataatcctgtaagatattattttcatccccatttacagttgaggaatttgagggtcagagaggtgaaataacttgcttaaggccgcataactagtaaatggtaacacactggggtttaaaccgccacctgtctgattccaaagtctgtgttcctcttaatcacaaactgtttctaatattgagaggaccatctgtaaataggtgcatatatacaaattgagaatgtacatattttccttcaaattaagtaatatagtcagataatacatagaaagttaatagtccttcaaatcagccatagcccaaacaatatagataattcagtttattgacaaagatatatatgagatataatttctgactctggctttagatgtttaggttttggacttttcaaatgagtataatccttagtggtttcaaatttaacttgaggaaccaatgattacaactaacaatatactgctagtctacaaacccagtctagttaaggatgccataacaaagtgccacagaccgagtggctaaacaaatttattttcttagagttctggaggctagcattccaaaatcagaagtcagcagggttgcttccttctgaagcctctttctttgacttgtagatggctgacatctccctgtgtcttcacatggttttctctctgttctctttgtctaaatttctttctttttttttttttttgagatggagtctgtctcttgttgcccaggctcgagtgcaacggcgcaatctcggctcactgcaacctccccctgctaggttcaaacgatttctcctgcctcagcctcccgagtagctaggattataggcatgcacctccacgcccagctaattttgtatttttttttttttttttttttttttttttagtagagatggggtttctccatgttggtcaggctggtctcaaactcttgacctcaggtgatctgcctgcctcggcgtcccaaagtgctgggattacagacgtgagccaccgcgccggcctaaatttcctcttacaagggcgccagtcatattggattagggccaccctagtgacctcattttgaataggatcacctctttaaagttctgtctctaaatatagtcacattgtgagaggtgaggattaaaacatgaaatttggcagggtgcaaagaactctaccagttcttccactgtttgcatcagtttcagtgtccctatcagtaaaagaagtcacaagccgtcttgaataattggaacccttctgccagattgtctaatgtcagtctcttttttttggatgctgcttcttctaagtcatcttcctcattgtttggcattggttcagaatccctcatctccatcaagttctcttaattcctctggtgtgtgttgtcttttagctcttacatttctctaagatccatatcttaaaacccttcactccctacttttttcacttttttttttttttttttttggccatatccacaacctccatgatttccttgataggctctgttttaaatcctctgaagttatgcacgacatctggacacagttttctccagcaggaatttattgttttggacttgatgcctttcacagctttttccgtaacagtgatggcatcttcaatggtgtaatctttccagattttcatgatgttttctctattagggttcttttccatagcatccataatccttcccatagagcactatgtgtaatgagccttaaaggtccttatgacctcctgatcttcagactgaattagagttatcatgtttgggggcaggtaaaccaactcaatgccttcattgttgaacttataggcttctgggtggtcagggcattgtccaatagtaaaagaactttaaaaggcagtcccttactggcaaggcacttcctgacttcagggacaaagcattgatggattcaatccagaaaaaggcttcttgttctccaggccttcttatacaaccaaaagactggcagctggtgtttatcttttcccttcaagatttggagcaggggagggaggtggtggctagcagcttcttagatgagggcagtcctgatcataaaccctactgcatttgtacaaaacagtagagttagcctgtcccttcctgccttatatcctgatgcttgcttctctttcttactaaatgtcctttgcagtctttttttcttccccagaatagggcactttcatctgcattaaaaatcttttcaggctctgcgtggtggctcacctctgtaatcccagcactttgggaggccgaggtgggcggatcacttgaggtcaggagttcgagaccagtctggccaacatggtgaaaccccgtctctactaaaaatacaaaaaaattagcctcccaggttccagtgattctcctgcctcagcctcccaggtagctgggactacaggcacaccctaccacacctggctaattttttgtatttttagcagagacagggtctcactgtgttgcccaggctggtctcaaactcttcaactaaggcagtcttctcaccttggcctcccaaagtgctaggattacaggcgtgagccactgcactggccaatttttgtatttttaatagagatgggctttcatcacattggccaaactggtctcgaactgctggcctcaatcagtccacccaccttggcctcccaaagtgttggaattacaggagtgagccaccacacctggccttaatttttttttggagacagtttcgctctgttgcccaggctagagtgctgtggcacaatcttggctcactgcaacctttgtctcctggtttcaagcaattctcctgcctcagccacccgagtagctgggattataggtgtgcgctatcatggccggctttttgtatttttagtagagagagggtttcaccatgttggccagactggtctcaaactcctgacctgaagtgatttgcccgccttgtcttcccaaattgctgggattacagatgtgagccatcgtgcccggccatgaggacgtgctttcaagtcaattggataaatacctggaagtgtgattgctggatcatatggttaagttaggttttagctttgtgaaaaactgccaaactgtcttctgaagtggctgtatcatttgtatgctcaccagcaatgaattagagttcctgttactctgcatgctcacaacatttggtattgtcagtttttttagattttagccattccaataggtatgtcgtagtatctcattgttttaattagcagtcctgtaataacagatgatgttcagcatcttcatatgcttatttgctatatgtgtatcttcagtgaggtgtctttagtccatcttttaactagtttcttgtgttactattttgtcattgaagagctctttatatattttggaatgtaaattctcgatgtgttaaacatttttctcacgatctggcttgctttgatttaaaaattttttttatttcaataattttgagttataggtggttttggttacattaatgagttcttttgtggtgatttctgagtttttaggtgtacctgagcagtgtacactgtgcccaatatgtagtcttatccctcattctttttttttttttttttttttgagatagggtctctgtcacccgggctggagtatagtggtatgattttggctcactgcagcttgacttctggggctcaggcgatcctcctaccgcagcctccagcctcctgagtagctgatatcacagatgcatgccaccatactcagctacttttttgtattttttgtagagacagggtttcgccatgttgcccaagctggtctcgaactcctgaggtcaaaggatctgcttgcttcagcctcctaaagtgctgggattatgggcatgagctactgggactggccaattttttttttttttcaagttgacttttttttttttttttaaagctacacggtctcgatctgttgcccagactgcagtgcagtggcatgttcatagctcactgcagcttcaaattcctgggctcaagtgatcctcttgcttcagcttccccaagaagctaggactataggcctgtgccagcacacccagctaattttttttctttttctttttttttttatttcatagagacaggatcttgctatgttgcctgggcttttctccaactctaagcctcaagtgatcctcttgcctcagcttcccaaagtgctgggattacaggcatgagccactgcacctcgcttaggctatttttttaaagagcagtttaaggttataggaaaatggagaggagggtacagagatttcccatatgtgcatgtcttcctccattatcagcaactccctgccagagtggtggatttgttatagttgatgaatttatgctgacacatcatcacctagagttcatagcttacattagggttaattcatagaatgttgtatattctgtgagtttaggcaaatttacaatgatctaccattaaaatatcatacagagtagtttcactaccctaaaaaatctatgccccacctattcatcccctccttccccgtaatctcaggcaaccattgatcattttattgtccccatagttttgcttttttttttgacatgtcatatagttggaaccataaagtatgtagccttttcagactagcttcttttgcttagtaatatgcatttaagtttcctccctgtctttttatgacttgatagcgtatttctttacagtgctgaatgagattccatgtgccacaatttatccactcacctattgaaggacatcttggttgcttccatgctttagcaattatgaataaagctgccataagcacctgtgtataggtttttgtgtgtaggatgtaagttttcaactttgggtaaaacaccaaggagcatgattgctggttagaatatgtttagttttttaagaaattgcccaactgtcttccaaaatggcttttgcattcctaccagcaatgaatgagaattcctgttgcttcacatactttccagtgtttggtgttgtcagtgttctagattttggccattccaacaggtgtgtattagtatcatcatttcagtttgcatttccctgatgacgtgtgatgtggatcatcttttcatatacttgtttgtcatctgtccatctgtcttgatttttttttttttaatttgtgttggcaaatgagggtcaggaattggatttgggatctagctttaaggaattagttagggtttggtattttgaatgtaaaacggcctaggaatgtatataaatcacaactgtaccatataccttttattattttgtgattataaaagcatagcaatcactttggaaaatttgggatactttcaaagcaggaaaaagtactactagtaattgtggggattaacattttgttatattttctaaattcttctttttcttctcctatatattctccatatatctctgtatccttcttttacatgtaattatgcagaacttttaataatattttagaggctacttttatgattattaaaagtaattttttaaaaataatgatgaggtcttgctatgttggccggattggtcttgaactcttggcctcaagcagtcctctccactgggcctcccaaagtgctaggattacaggcgtgagccaacacgcctggctaaaagtaatgtttatgtgagcatcaggtgccacaagctttgtctacatttctcatacttctttgtttagagtactggaagtagattctggatcgaagactactgctggatgttacgaattattttcctaatctatcctttttatattacattaaggagtttaacattttgtagagcttaaaaagttttttggtggcatcatttttgttttatttaaaaattacaacaaaattatttgtcattttaccacttaaaagtcagtgattttgggtgatgataatgtgtcagtgtagtttcaccagttgtaacaaactcaccactctgataggggatgtttatgatggggggaggagatgcatatgtagaaggaatagataggctatctctgtacttggtctcaattttggtgtgaacctaaaactgctctaagaaatcaaaaagggaaaaaaatggtacagtaattaaaccatgccctcaattcagttgcatattaaatttgagtgcaggctgggcatgatggcttatgcctgtaatcccagcagtttaagtggctgaggcatggctgggcacagtagctcatgcctgtaatcctagcactttgggaggctgaggcaggcagatcacctgaggtcaggaattcgagaccagcctgaccaacgtggtgaaatgccatctctactaaaaatataaaaaaattagctgggcgtggtggcaggcgcctgtagacccagctactcaggaagctgaggcacgagaatctcttgaacctgggaggcggagcttgcagtgagccaagatggtgccactgcactgtagcctgggctacagagcgagattctgtctcaaaaaaaaaaaaaaaagaaagaaaaaagaaaaaggctgaggtgggaggatcacttgaactcaggagtttgagaccagcctgagcagcatgaggaaatcttgtctctacaaaaactacacaaattagccaggtgtggtggcatgcgcatgtggtcctagctacttgggaggttgaggcaagaggattgcttgagtctgcctgagggtgaggctgcagtgagccatgtactccatcctggggaaagagcgagaccctgtctcaaaaaacgaaaaaaaaaaaatttatgcacctttctccgtttttttccccaagtatgagcagatacatctatataaacattgttctcacacattaaaacaatcatgttattttgcttgcattttttttttcaattattgtagcatgggcatccttttaggtaattgtatatggacatctactgcattattttcaatggctatgtaatatactgttgttggatgtcctttatttagtcattcatctgttaattcagcaaagaactattgagtacctgtcatgtgcaagttactggggatatattcaacaaacagaacaaactgaaatctctcacctcaaggagcttgcatcaagttggagtttatattcccctattgatggtcattatttatttctcctcttttttttttttttaggtagaatattgtagtgaatatccttgttatatttttcatctttgttaaaaccccaattggtatctacatcttttgtatcttgatgtacttgtgctgtatttctagccatggacttgttgagtctaaaggatatatgcatttaaagtttttaatttttgccacaataccattttctttattttacatttcctgaatgcttggaagggttgtgcacgttttcatgtgtttgctggtcatttgtactactgtgaattgcctactctggttcttagtccatttttcttagtagattgtcttttcttgtctgtttttcttagtagattgtcttttctaatttgtaaagctcctatgtatcctaaactttaattccttgtttgtttatacaccagagatgttttctttctgttacttaactatagggtggtggttttttttttagaaggagttttacacttgttgcccaggctgaagtgcagtggcacgatctcgactcactgcaacctctgcctcgtgggttcaagcaattctcctgcctcagcctccagagtagctgggattacaggcatgtgccaccatgcctggctaattttgtatttttagtagagacgaggtttctccacgttggccaggctggtcttgaactcctgacctcaagtcacacgcctgcctcggcctcccaatgtgctaggattacaggcatgagccacggtgcctggccccagatgtctctcttaatgagtggctgagctgtatgttttttttactctcagagacatggctttcccttatccagaggcagtgtcactggtagggaggatctcgattatttagtctttgtaactgccctgctgttttagataggtagggcagggctgggcacagtgactcacatctgtaatcccagcactttgggaaactgaggtgggcagatcgcgtgagcccaggaagttggagatcagcctgggtgacatggtgaaactctgtctctactaaaaccacaaaaattagctgggcatagtgtcatgcacctgtagtcccagctacttggaaagctgaggcaggaggatcacttcaccctgggaggcagaggttgccttgagctctggtcatgccactgcactccagcctcagcctgggtgacagactgaaaccctgttccaaaaaaggaagaaactgaggagggaggtggggtaacatagctagtaattaggacagctgggatttgaatctttttttcctccttccagatccattggaacaagcattatttttgataatactcccatgaccatccactaacttcttatacttcctaaaagtgatgttgtatactagctttgtatggttctttcattgacaccattaaacctaagtttaaaaatgaagcatgtcattccctctcccaccatttaaaaatttttttttatttgatgctgagtttctctctgttgcccaggctggagtgcagtcgcacgatcttggctcactgcaacctctgcctcccgggttcaagcgatttctggctaatttttgtattttcagtagagatgggctttcatcatgttggccaggctggtctcgaactccagacctcaagtgatccacctgcctcggcctcccaaagtgctaggattacaggcgtgagccactgtggctgacttctcccacccctccctttttgttcccagttctcattggtctacagtgtgagtcccaagctggaatttggaagaagcttggggctattggacataatgataataaaatagttaattgattaactataattaacatgaataatgaaatccaccattatatagcgctatctgtctggaacagtcgtgtggttggttccttttagctcttggattaaatgttgtatcttaggagagcccttcccagacctgaaattactttcttctccctcttcttcccccttatctatatcaccttatttatttatttttgagatagggtcttgctctgtctcccaggctggagtgcagtggtgccatttcagctcaccgcaccctcaacctcctgggctcaagcgatcctttcacctcagcctccagaatagctgggaccacaggcacgtgctaccatgcccagctaatttttgtattttttgcagagacaggttttgccgtgtgcccaggctggtcttgaaatcctgagctcatgcagttaacccaccttggccacccacagtgttgagattacaggcatgagccactgcgcctagccctaatgtgctttttaaagagtaagcatagctgggtagagtggcgtgtacctgtagtcctgagtacttgggagactgaggcaggaagattgcttgagcccaggagttggaagccagcctgggcaacatagcaagactgtcaaaaaagaaaaagaagaaatttaaaaaagtactattagtactaacagtttacatggtatagtactatgtatgtatgtatgtatgtatgtatgtatgtatgtatgtatgtatgtattttgagacggagtcttgctctgtcaccaggctggagtgcagtgatgtgatcttagctcactgcaacctctgcctcctgggttcaagcgattctcctgcctcagcctcccgagtagctgggactacaggtgtgcaccaccacacccagctaatttttgtatttttagtagagatggagtttcgccatgttggtcaggatggtcttgatctcttgaccttgtgatccccccgcctcggcctcccaaagtgctaggattacaggtgtgagccactgcactcggttgtactttgttttgtttgatgtaacataaaatatttgagtacttttctttctttcttttttttttttaaagagctaggatgttatactattggcccaggctagagtgcagtgcagtggtgcaatcacagctcactcaacctcgaactcctgggctcaagtgatcctctcacctcaacctcccaagtagttgggagtaaaggttcatgtcatcacacctggctaattcttttctttcttttttgagactgagtttcattgttgttgcccagactggagtgcagtggcatgatcttggctcactgcaacctctgcctcctgggttcaagtgattctcttgcctcagcctcacaagtagctgggattacaggtacatgctaccgtgcccggccaatattttgtatttttagtagagacggggtttcaccatgttggccaggctggtctccaactcctgacctcaggtgatccacccaccttggcctcccaaagtgctgggattacaggtgtgagccaccgtgccaggccaattattttactttctttttgtagagatggggtctttctgtgttgcccaggctggtcttgaactcctgtcctcaagtgttcctccagcctcacaaaggattgggattacagtcatgagccaccatacctggtggcttttaagtcttttgttaaaaacaactctggcagagcaagaagacatacaggccactattttgtttgcttttgttttatagtcagtatttcctttcaagttctatttttggcacagaagctgcattggtcctggaagaagaccaggcaacaagctgctgtggctccagttgagtttactttccttgacaagtgaggaatgcattgggtacttgaataaaaccagggaggaatgatggcacttccgttgtgccagaccgtggcaagaagctaggcagctactgtaagtctgtactttttttctgttatctttggaatagttcacatggtagaagaaaaaaaaatacaggcatacctcagaccattgtgataaaatgaatattgtgataaaatgagtcactaattttttggtttcccagtagataaaaagttatgtttacactccattctgttaagtgtgcagtagcattatgtctaaagaaacaatgtatataccttaattaaaaaaatactttattgtggcctggtgggtagctccatcccagcacttggggaagctaaggcaggtggatccctttagctccatgagaccagcgtgggcaacatggcaagattccatctctaccaaaacgatgtaagaattaaccaggcgtggtggtggtgtgtgccggtaatcccagccatttgggaggctgaggtgggaggatcacttgaacctgggaggcagaagctgcagtgagccaatattgtgccaccacactccagcttcggtgacagagccagactctgtctcaaaaaaaaaaaaattattgctaaaaaatgctgattgatcatcttaacatttagtaagctgtaaatcttgctgggtgaaggtcttgcctcagtattgatggatgctgactgatcagggtggtggttaatgaaggctggggtggctgggacaaattaaaacagttttttttttttttgaggcagagttttgctctgttgcccaggctggagtgcagggtgtgatcacagctaactataacctctgccttccgggttcaagcagttcttctgccacagcctctcatgctgaggcaggaggatcacttgagcccaggagttcaagaccaggatcacttgagcccacgagtttgagaccaagctgggcaacatagcaagaccccatctctataaaatattacaaaaattagctgggcatggtggcatgcgcctgtagtcccagctactcgggaggctgaggtgggaggactgcttgggcctgggaggcagatgttgcagtgagccaagattgtgcctctgcactccagcctgggcaacagagccagaccctatctccccaccccataccgtcccccaataaaaaataaataattttgtttttttaaaggctggatgcggtggctcatgcctgtaatcccagcacttggggaggctgaggtgggtgaatcacctgaggtcaggaatttgagaccagcctggctaacatggtgaaaccctgcctgtctctattaaaaatacaaaaatgagccagacatggtggaggcgcctgtaatcccagctacttgggaggctgaggcacaagaattgcttgaactcgggaggcggaggttgtagcgagctgagattgtgccactgcactccagcctgggtgacggagagaccctgtctcaacaacagcaacaacaaaagtcaatcctctcaaaaccctgctgctcatggctgggcgcagtggctcacgcctgtaatctcagcactttgggaggccgaggagggcggatcacaaggtcaggagatcaagaccatcctggctaacacggtgaaaccccgtctctactaaaaatacaaaaaattagctggacgtggcggcgggtgcctgtagtcccagctactcgggaggctgaggcaggagaatggcacgaacccgggaggcagaggttgcagtgagctgagatcacgccactgcgctccagcctggttgacagagtgagactccgtctcaaaaaaaacaacaaaaaaaaaaccctgcggctcctttaagaactatgtttatgtgatattctaagtctttttttatgatttcgacaatgttcacagaatcttcactggggtagatgccatctcatgaaaccactttatttggtcatctataagaagcaactccttaaggctgggtgtggtggctcacacctgtaatcccagcaggcggattgcttgagcccaggactttgagactagcctgggcaacatggtgaaaccccatctctacaaaaaatacaaaaattagccaggtgtggtggcacatgcctgtagtcccagctcctcaggaagctgaggcaggaggattgcttgagcgtgggtggttgaggcctcagtgagctgtggtacgccactgcatttcagcctaggtaacagagtaagaccctgtctccaaaaaagcagggagcaactcctcaaactcctcatctgttgaagtttcatcgtgaggttacagtaattcagtcacatcttcagattccatgtcttttcctatttccaccacacttccagttacttcctccactgaaatcctgaacccttcaaagtcatccattagagttggaatcaacgtctttcagactcctatttgtgttgatattttgacctcctcccgtgaatcagaaatgttcttaatggcatctagaatggtaaatctttaccagaaagattcactttgcccatatccatcacagaaatcattatctatggcagctgtaactttatgaaatatgtcttaaatagtaatacttgaaagttaaaattgctccataatccatgggatgcagaacagatgttgtgttaatgggcgtgaaaacaacattaatctctttgtaccttgctatcagagctcttgggtgaccacgtgcaccgttaatgagcagtaatatatatacacacacacacacacacacacacacacacaagtatatacatatatgtgtgtgtgtgtgtgtgtatatacattttttttttcccatacagagtcttgctctgtcatccaggttggagtgcggtggcatgatctcagctcactgcaacctctgcctcccaggttcaagcaattctcctacctcagtctcccaagtagctgggattacaggtgtgtgccaccacgcctggctaatttttgtatttttagtagagacagggtttcaccatgttggctaggcaggtctagaactcctgacctcaggtgatccactcacttcagcctcccaaagtacggggattacaggtatgagccaccgtgcccggctaattttcttttctttctttttttttttttttgagacagattctcgctctgttgcccaggctggagtgcagttgcgtgatcttggctcactgcaaccttcacctcctgtgttcaagcgattcttgtgcttcagcctccagagtagctgggactactggcacacaccaccacacccggctaatttttgtgtttttattagagatgaggtttcactatgttgcccaggctggtctcgaactcctggcctcaagcaatccacctgccagcagtaatattttgaatttttttttggtgagcagtaggtctcaacagtggacctaaaatattcagtaaatcatgctgtaaacagatgtcattcaggctttattgttccatttataatgcacaggcagaatagattcagtgtaattctttttttctttttttttgagacagggtctgcctctgtcacccaggctgcagtctgcaggctgcagtgctgtggtgcaatctcagcttaatgcaacctctgcctccaggctcaagcaatcccttccacctcagcctcctgagtagctgggactacaggcacatgccaccatgctcgactaatttttttgttctttatggagacagggtttcaccatgttgcccaggctggtctctaattcctggactcaagtgatctgcctgccttggcctcccaaagtgttgggattgcaggtgtgagccactacacctggccctttcatttttatgttatgtagatgggttctttccttaaacctcatgaagcaacctcttctaacttttcttcagcttcctcaactgtctcagccctcatagaattgaagagagttatggtcttgctttggcttatggaatattgtggttggtttgatctttccagtccatgaaaacattcttcttaccagcaataaggctgtttcactttcttgttattcctgtgtttattggagtagcacttttaatttccttttaataactttctctgaggctgaggtagggggatcgcttgaacagccagcagttcaaggctgcagtgagatgtgattgcaccactgcaccccagtctgggccatatgaacgagacccagtatctagtaaaagaaaaaaaaacagtacttgtctcttcgcattcacaacttggctgtttggtgcaagagtcctagctttcagcctcagctttttgacatgccttcctcactaagcttaatcatttctagccccccccacctgccttttttttttatgagacagtctcactctgttgcccaggctggagtgcagtggaacaatctcagctcactgcgacttccacctcccgggttcaagtgattctcctgccttagcccaccaagtagctgggattgtaggtgtgcgccaccagacccagcaaatttttatatttttggtagagatggggtttcaccatgtttgtcaggctgctcttgggctcctgacttcaagtcatctgcccggctcagcctcccaaagtgctggaattacaggggtgcgccaccatgcctggcccatttctagcttttgacttaaagtgagagatgtgcatttcttccttttacttacttgaacacttagagaccactatagggttattatttggacttatttcaatattgctgtgtctcagggaataaggaggcctgaagagaagggagagagatggggaatagctattggagcagtgagaatatacacagcatttactgattaagtttaccatcttatatgagcacagtgcatggtgccccaaaacaattaacaatagtaacattgaagaacactgatcgcaggctgggcatggtggttcacacctgtaatcctagcactttaggaggctgaggtgggtagatcacctgagatcaggaattcaagaccagcctgaccaacatggtgaaaccctgtctctactacaaaaattagccaggtctgctggcaggcgcctataaccccagctactcagtaggctgaggcaggagaattgcttgaacccgggaggcggaggttgcagtgagccgagagctgagatcctgccactgcattccagcctgggtgacagggcaagactattgtctccaaaaaacaaacaaacaaacaaaaaaacactgattacacatcaccataagagataaaataataatgaaaaagcttcttgagataataggagcatcaccaaaatgtaagggaggcatacaaagtgagcaaatgctgttggaaaattggcaccagtagacttacctgaagcagggctgccacaaacctcaatttgtaaaaagcgcaatatctgtaaagcacaataaaatgaggtatgcctgtagggccaggaaaaattgaggaaaaattcattcctcttcactgccccacaggtgtcttggggagagggagtatgaaaaactaatttaattttaccctttgtctttcaggtttgtcctatttcaaaggcacgtgatgggatctttttgaagtgcctttcttagccacacctagggattaggttctctgaattcagggacttctcacagtatgtttttacttggttgccttccttttcctaaaatgatttaagaagtcctttgcacatacagaatgctccgtggccattaaataacaacccttttcctgccagtcattgacctccaaaaattcaaggggtcagtttgtttgaacttgagatctaacaccatttgttcagtttttttgttgaaattactgaatcaaacttcagaaaaagggtggggagcacaacagagtgacaaaattatgctattaagttgtgtagaaaatagaaaacacttttgaacatatagacaagataaaaaggccacgttttgcgttcgtcatacaaccgctaaaaatacagcagtgccttgctgctgctctgtctctgtggaatatcatggttaaagtataacccccatttggtgcataggaaaaaggcacacaaaattaatttaatttttctaagattacatatataaaattacaaggaacgtgtagatttcctgactatacctggtattttatcaatgaattgaaatgtgtaaagaacctcagagtacaacagagtaattactatggtttcctagcatgcattgtaactacttaatacattattaattattcagggaggtggttttttctagttgctactatgtatattttgattttttttttttttagcacagaggcatagtaatatttgtattaatgttggtgaaatgaaaatttaaaattttatgtaaaatgaaaatttaaattgaatttcagaacaaaactttatcaaatattttccaaaataggcttttgtgttttaagtttctaccttaattaacttttaggccacccttggtttttgaaatttgaatctgattctgttttcttcaagggcctgtatcttcctttgtatacgctttgcatagcaagtacaggtcatgcttagcattgtgttgaatgttgagtttatttcagtgtaaactgaatgctttagcgtaaactcagcattcaacacaatgtctggcattaaatgatttgcatagtattatgtaaaatgttcttgtacattgtagcagtgaggatatctgatataattttgacatcagcattatatatgtaattacatttctatttttaagtattaaggaatggaaatattttaatcttaatatacttaggaactctgggatcttccccaacctccccacttcccccaatagctgctgctggagatggaatcctatctgagggttaataataatgccatcacccattcccttcccccagccttatgctagagcctagtttgcctgcagctgcagtgctaggcatctttcaggaagtgaccttggcttgtattaatcaaattcagaacacacaaaaaagcttcttgctaacatgctgacttgatgtaaaattttatcgcatccattttgtttcaaaatgaggccattttgtaaaaagaagatatacagaagacccctaatttattatatatctatatatacgtatatgtaaagcttttgcaaaccatgttgaaaaaacaactaggtctattttaaagtagactttttattgccaaatatgcataaacttaaatcatgaaggcttgggaattgttactagaaaattacttcttttaatgtcgaattaagaaaaaactatcagcatcgagtttatttactatcttaactgacattatattgctatataaactttaaacactgaagttattttggaacccttcagcagttatattaagtcacacacttctgtatatttgcttactttcacgttttcagaaataactggtatcttactttgctggtttggataagagctaatatcctacatgaaatcgttttcttaggcaatggtggtgcctacagggtattctaaacgtaaaggtaaatttaagtcaatgagtctgttaaaattcaactacctattgtgtcaaagagagaaatattgctaactacaaatttacagtgtgttcatttaggatttgactaatcattttaatagtagagcagttaatacagcgatttcacttttatcctgtggtgcttcaaaggcatctagtttttaaatgtagtccagttaaggtgtatgtagtagaggttttcattttagacttgctcaatgttaaatatagaatgttgaaaatattatttaatggattagtttattggtttctgcatttgaagaaatttacataaattagttagggagcagttgtacctactgccaaatggttcactcctgagtttattgtacagttactcccaggtactgaaatataagaaaagaaaaatttaaaccttagctaagagctctgcctgcatttctgtggatccacattatgaaaaggatagaggaacattacctgtgtatagtaatggtttgaggagagggtagggaaactatgcaaataaaaaaattggggtataggcaaatccttcagttagatgtctttattatctgagttacttttaaagcatttactggatacacaaccagtattatctttttaccatcctataaattgttcatagaattgcaacctcatggaggaaaatccatctcctttacctgcctaaatttattctttgtcttgatactagcattaataattggtttgttagatactacaggctaaagaaactcagatttcaagaagaaagaagataattactcgatcatttctcccctcaaacacctgtttaaaatatattgtcttgaataaaattgtcaccttgaacttattgtgttctttgccttctccactcccctgtccttaaaaaaaataaaaagaagggaaagccttataagaaaaggaaaatgtgcaatcctggtagccaatgagttaatgttcatttgcagcccgaggggtcagcatgcagcctgtgtttcctgattggctgctaaaaggtgaaattgaaaccactgtaaacttttgaccctgtagcaattcttgtggaacgccttccactggtggagcccagagctttgctcacttccccacccaactctcccaccctctttcctgtatttattttgtgtgatcctgcagcactgcatgcagtttttccaaagtggcagggagagagaggcagaacaagcgcaagcaagcggcttgcttgaatgcctgttttggtaaccattggataagagctaatattcaactcagccaaagatatcaggccttttatactaatctgccaaccagatttttaagttttctccttaatctaaagctaatttaaaaaaatttaggctagtttagttccattgttcatcagtggatagtatcgttgtataagcaaaaatgtatggcataatttcctggatgtcttgaattaaaaataagttttaagttttagctacctttaccccatttatgtttcctgtatccctatgtaatttttacacaaatggccatttcatagaaggttttttgtcttttgcctttattatgaagaaactcaaatggcattttggttatgacaactctggacataattgcagaaattgtacaattaatgcctccccctttggctgagataaatggttttggatttgtcttgctttcacatgtaaatagtgttgaacagttaacaaccccatgaaaaaggcagggtagtttttctctattctttccttatactctcatgggactctggtctttttaattcttccttttatccatggtgtctagcacaatgtggcacatggatgcttagcagatgcttactgaatgaacatagctttcattttaggaactttaggtctgtttatacctgcttcccttttcctaattaattgatggcagcaactgtgatttgcttatttccaagtgccagtgcagtgcctgattctaatagatacacagcaagcatttaattgaaatcgaattaaaatctaacacaagatcatttcaagaagcaggactttacaaaatctaggttttcagaagccaaggcgtctgttttcactgcgttattatgaattttcaggctgattccgtatagaactaaatgtttaatttattaaatatgtagaatacattataagtcagcttgattctttctagtatatatcacaagatatgtggtaatacctgtctttattttactagacatgcatatgctgtaatttgaaataattccttgtcccccactcccttatcaagaagattatagcatttaaaaaagattgttataaatgtcttaccaatgttctcctgggaagcaaatacatttttacttaattgaacatacaataatggactaagtaatgggaaaaaaaaattcttaaactgagttaagtttatatagctcaaaaaaagtggtaccattttatataactttattattattattttttaagacagagtcttgctctgttgcccaggctggagtgcagtggcgcgatctcagctcactgcaacctctgcctacggggttcaagcgattctcctgcctcggcctcccgagtagctggaactacaggcgcccaccaccacacccagctactttttgtatttttagtagagatggggtttagccatgttggccaggctggtctcgaactcctgacctcaggtgatctgcccacctcggcctcccaaaatgctaggattacaggcatgagccactgcacccagccccattttatataacttgaaatgttcatatgattttcaacttgcatttggtcttctcctttcattatagctacagattagctgtagttgattgttgcaagtgaaacctgtggttagagttttgatcaaagatacttatcacttgataaataatcccaactgcaaaagtgttggattttgacgttaaatttaacactaatattttgcagcctttaacctgaaattcatttggtgacccagtctactctgtagtactttgaagattattgagcaacagctagcttttcccagtgacagtggctccccttttctgtgattttagggaagtgaggaaggagatcctgggagcagtgccagtgggagcttggaaagaacaatgggtttaatatgattaattgtagaatccttgccccttttcatgttcaacagtaaaagaaaaacatgtttataatattcagtggctgctttttgccctgttggtgtttccaagcattatatattatatagtttggattttcctgtgtatcaactcctctccccaattttattctttgttctggctttgaggcatatcttctcagactagctattaacaaggcttaatttgatgtttgatttcccctcacgtccttttaggtctctggtgatgaaggcttaaaataaaaacctaaaactaaaacaggggccatgttgtccaagatggactcagattcctgagctcaagcaatcttcctgcctcagcctcctgagtagctggcgttacaggtgtgcgctgccatgcctggcctggtgatgcaggttttggtaatgtagatgtcatcagtaaaccattaattctactagaaaatttaatgtccctgttaccttctcagatgtctaatgtttctggaacttctcacatttagttttatgtcagtatgatttggtttttgtatgtgtgattgatgaaaatctgaattgtgaaaagggataatcttgtttttgataaagaaaaaaaatactgtcctaagaaatctgctaggattgttgcctttgcagaatcttttttccagacaagtttaactcaccagcaaatttactaacagttctatacttacaggatcctggtatatagtagtactcctttccaggttcctggtaggcaagccaatcattgttctgtgactatttgcgaatctctctggtttaattatacacttccttggaggggagaattttgtacctggcttgtctttgtgttactgaactgaactgggtctatttttctgtgtatgcaatggaaagctgaacactaagcaccaagtttttgtaggaagaaaagtttattgcaaggctgctgtgtaaggagacaggagttgggctcaaatctgcctctctgaactagagtttgggtgcaggttttatatttggagagtaatgaggtgtgatctgagtggatcctgccatgggatgatgtcaaggcttgatttggttgcatcttctgtcctgccatgtggtgtctgctcttattcattcgctgttcctcagtttgatcatttagattccacccatggttgcattctttgttcatctgggcatgctgactttacatgatcttccacctgggggtccagcagttaacatttgggtccaagggtgcagattggcagggtcagcattcctttgagaagtacgaagaccagcactataacactggagtattaatctaggccctctcaccaccttctacacgaggcagcagtaattgtttcctaggtccattatgctactagatactttctgactcaaattcctttcctggccgggcacggtggctcatgcctgtaatcccagcactttgggaggccgaggtgggcagatttcttgaggtcaagagttcgataccagcctggccaatgtagtgaaaccctgtctctacaaaaattagctgggcatggtggcatgcacctgtaatcccagctactcgggaggctgaggcaggagaatcgctttaacccgggaggcagaggttgcaatgagccgagatcatgccccactgcactctagcctgtgcaacagagtgaaactccatcccccacccccatccccccaaaaaatcctttccttatcccacctcttttgttccttaggtgctaaccccaccccatgaccctccttcgtctttcctaataaaggaaaaaacataagagaaccattttagaagtcaaacctgatttaaaacagggccagaagatcttagaggttctttacagaagttctgcctaccttttctccgttcatcttacacgaattaaattggatagcataaaaattcaagttaaaaaacataacattcggtccggtatggtggctcacacctgtaatcccaacactttgggaggccgaggcagacagatcacttgagctcaggagttcaaggccagcctgggcaacatggtgaaaccctgtctctacaaaaaatataaaaattagctgggtatgatggtgtgtgcctgtagtcccagctccttgggtagttgatgtgggagtattgtttgagcctcggaggtcgaggctgaggtgagccatgaccataccaccacactccagccagtctgggcacagagtgagatcctgtctcaaaaagaaaaagaaaaaagctacaactttggtgcacaaaattattaaaaatattatataaaattaccttcaggctgtgtgtataagtaacataaatgaattttatgtttggacttgggtttcttcccctagatatctcagtatgcatatgcaaatatttaagaaatctgaaaaaaattcgagacacttatgcttctaagcattttgcataagggatagtcacccggcactacctagagttttctttttcctttgttgtgagccacatgtaatgtgcctcccattccctgctcactgattttctcccctctaattttagtttcagaaacacaacagacctttccataatgcagctagattgtggttggctctccctatatactgtctgcagactacactacgtggaatgtccatggctataatatgtttgttacttgtaacttgtgaatatatcatttttcctttcccccataccaacagatctaccaattccagcatgaaagctattaactttagggcgtaattatggttgttatcttggttcgataccattggaattagtggcaatcatattgttgctttattgttaaatttggaaattcataaggtaaagtgaatgttcttactggttcacttatttattgcagcagaacctgcacgccatttcttcaagtgcaaaagcctgctgtttatatgttcatgtgttttattgtagattattttgaagaacggtctctcatttccttgctaatattttgttttggtggtcaaaatgcatccttttatagaaggcaagaaaacatctgagcctttcctctggcctttgcttgttggctttatccatccctccctcatctgataatttttggactagggcatttaagcatttgattctgccagggtattaatgttgtctttattctctgttgagcactgattttggacaaatgaatacccccacaagttcagagtacccatctgttttgatcacttttcaagattcagaactggtctccaccacctccactttgcattatccatttttacaaactgtgacagagtacatattatatatgctatgcctgacttttattttaattaattaattaattaatttacttatttttgagatggagttttgcttttgttgcccaggctagagcgcaatggcatggtcttgggtcactgtaacctctgcttccctaattcaggtgattctcctgcctcagcctcctgagtagctggactacaggcgcatgccatcacaccaaactaattttttgtatttttagtagatatggggtttcaccatgttgaccaggctggtctcaaactcctgacctcatgtgatccacccacctcggcctcccaaagtgctgggattcgaggcatgagccactgcgcctggccctgacttttgttttttaatttttatttttttgtgtgtggagatggtgtcttgctatgttgctcaggctgatcttgaactcctggcctcaagcggtcctcctacctcagcctttcaaagttctgggattataggcatgagccactgcgcctggccctatgcttgacttttcaaacagaagtagtgattatatggtacaataagacatctactcaaattcctaggaagaggtggtgtacttgatagcttttgtttgtttcatatatccagggaagggaaaaatgggaagacttaatttttttgagagagaatctcgctctgtcaccctggctggagtgcagtggcatagtctcgggtcactgcaacctctgcctcccaggttcaagtgattctcctgcttcaacctcctgagtagttgggattacaggcggatgccatgtcgcccggctaatttctgtatttttagtagagttggggttttgccatgttggccaggccagccttgaactcctgacctcaagtgatttgcccgccttgcctcccaaagtgctgggattacaggcgtgagccaccacgcccggctggaagacttaatttgtgggtgactaatcataatgcttaaatgaagaaaagacaataaaattcaatccctcctcttctttttgtcctcaggatcaaaatacttgctggatggtggactcagagaccaataaaaataaactgcttgaacatcctttgactggttagccaggtaattcagctttagtttgatttgatcctttgtaattttttgtcttcaaccttctgaagatattaccctcctctttaatttatgatttaattaaaactatttatgcttcatgtttttctctttaatgattattaaatgaatgtgcttagagtacttgagtgaatacgtatgtgtatgtacagttggcccttgaacaactgaggactggggacactgaccccttgttcagtaaaaaatgtgcagaactttcgactccccccaaacttaactactaataacctcctcttgcctagaagcctcactgttaatataaacagctgattaacacatattttgtatgttacatatattatatcctgtattcttacaataaagtaagctagagaaaataaaatgttattaagaaaattatggccaagtgcagtgactcatgtttataatcctagcactttgagaggctgaggtggttagatcacctgagtccaggagtttgagaacagtctgggcaacagagcgaaaccccatctctacagagaatgcaaaaactagccagacatagtggcctgtgccttagtccctagcactagagacactgaggtgggaggattgcctgtgcccatgaggttgaggctgcgcctcagctgtgattgtgccactgcactctagcctgggcaacagaatgaaaccctgtctccaaaaagaaaaaaaagaaatagaaaaaaggagaaaattttaaggaggctggacatggtggctcactcatatgctcacaactatgatcctagcactttggggattggaggtgggaggatcacttgaggccaggagttggagaccagcctaaacaacacagtaacacccccagttctacaaaacacacaaaaaattagctagcaaggtggtgtgcgcttgtagtcctagctgcttgggaggctgaggtgggagattgcttgatctcaggagtttgaagctgcagtgagctatgactgcaccactacacttcagcatgggcaacagtatgaaaccttgtctctagaaaataagtaaataaataaataattaaaaaggaaagacatggccggatgcggtggcgcatgcctgtaatcccagcactttgggaggccaaggtgggtggatcacctgaggttaggagtttgagaccagcctggccaatgtggtgaagctccgtctctactaaaaatacaaaaattagccgggcatagtggcgtgtgcctgtaatcccagctactcgaaaagctgaggcaggaaaatcacttgaaccttggaggtggaggttgtagtgagctgagatcatgctacagcactccagcctgggcaacagagtgagacttcatctcaaaaaaaaaaaaaaaagtcataaggaagagaaaatatacatattattcattaagtggatcatcataaaggtcttcattcttttcgtgaggttgagtaggcttgaggaggagaaagaagaggaaatgttggtcctactgtcttaggcatggcagaaatagagaaaaatctgcgtataacagaacaaatgcagttcaaatgtgttgtacaaggggttatggtattcgtatatatgtatatacatacaaatacaaacataattttgggggaagagaagaaattccccctccttatgtgtgaatattttaatggcatttagtcaaacatctgaattagcctaacttacatttgctgtttcaccttgtgaagacaaatttccccagattgcttgtgctggcaaataacatttcatctaacccctttcttaactttttttttttttttttttttttttgagacagactccctctgtcacccaggctggagtgcagtggtgtgatctcggcttactgcagcttctgcctcctggattcaagcaattctcatgcctcagcctcccaagtagctgggattacaggcgtgcacggccacatccggctaagttttgtatttttggtagagatgggatttcaccatgttggccaggctgaaactcctggcctcaagtgacgtgcctgccttggcctaaagtgctgggattataggcgtgagccactacgcctggccccttttcttaacttttaatattacatcagaataggaaaaatgagaatagaaaaagctgtctagttgccgagaaaacaatcatgctttgcttagctaaatttcttttggtaatcccatcattctcttggttagctaggtttgaaatctgagttgtctttgaatcccaccgtactctgattcatttggtaagcaggctttatctggctttctattttcatgtgtcctgtatttgttccactttctgttcctaattttagcttccgaggccaagaccccataatttcatgagggtgtttttccttgtctctactgcttccttgtccactcacttaaaatttagctagattttcctaaatgtatacttttagccaagcttatgttgtgctctaagttttgtgctacctttccttggcttacagaaagaaaaagtacaaactcccttctctgacatttcaaatggtactttatctgagaatctatccaagttaccagccttaggtcttgcaatttccctgtaaaatccctcagttaattgtgatatatacccattcttctgaacatggcagagaactatctccacaggttttttttttttttttttgagacagagtttgttacccagcttggagtgcaatggcgcgatcttgtttcactgcaacctccacttccagggtcaagtgattctcctgcctcagcctcctgagtagctgggattacaggcacgcgccaccctgcccggctaattttgtatttttagtagagacggggtttcaccatgttggccaggctggtcttgaactcctgaccttaggtgatctacctgcctcggcctcccaaagtgctggggttacaggtgtgaaccactgtgctcggccaattttttcttttttaaataccttttatttggaagtatacatttacaaaagttacaaaaatatagtataaagaacatctggatatccgttatccagacttacccacttgcttatttgtatttgtgctgtcctactctcttttctctttttctacccacgtaaacacacacacaatttttttttttaaccatttgagggtgagttacatatgttatgcttctttcccctaatacttctgttgtattcctacagatagggtcattctcttatataaccatggtacagttaataacttcataaatggacatcgatgaaatctatcgcccatattccagttttgtcagttgacctaagaaagtctcttgtagcattttctatgcttcctgtatagactacagtctggggtcaggttctgcattcagttattatttctctttggcctcctttttcctgggatattttcacagcctgtctttatctcttatgacattggcatttttgagaacacaacccttccctaacccctttactctgttcagtggagatgttcttcattttatgttggtctgaaatttccttgtgattagattaagatgttatggattcttggcaggaatactgcatccgcaatgtgatactctgagatggagtcatatgacgtccgtctgtcccttattgtgatgcaaattttgatcccttggccaaggtgttgccagatttctccaccatttggtttttttgccctctcttttgccaagcaataagcagcttgtggggaaacaatgcagatattctgattcttttcacggtttcttctagatttagcatccattgactcttgtctgatccagctttttattgtgatgattgcaaaatggtcatttttttctttccagcattcctttcccattacccgtcggatcttggctgtattccataatcaatagccctatgtattggtgatggattcatgaattcctattttttgaatggtttacaattcacttaccctgcttaattattttagtgctcaaattgtcctagaagtttggctagtgaaactcctgtaagtgggccgctgtgtccttgtggggaataaaagttttagagaccaagatctctctgagtgctaggtgtcctcactacttctgggctgttttctcatcttggcctttttagtggatagagctaggaaataatatgcatgcttatacacatacatgtacatatacatactcatacagtcatcccttcgtacctgagggtgattgggtctaagaccctttgtgtgcaccaaaatctgctgatgcttaagttctttaaactataaagtagcaattgtatttgcatataacccatgttcaatttcttgtatgctttaagtcatctctagattacttataagaatctaacacagtgtaaatactgtgtaggttgttgttaaactgtattttttaatttgtattttattgctgtattgtttttttaaatttattttttgagtatttttgatccatggatgcagaatccacgatacagagggccgacttcgcatgtgttcattgaaacatacatatacatattttagaaatcatgagcttatatcagtatgtacgtctttattccatgtctacagggttctttgtacttcattttttatttttatgtcccttattattatgtgggaatcctgactctcaaccttagtacatttactcatttgcctaatcctctaatacatctaaaataatttcagaattggttttttcatttcactgcaataaacaaactgaaaatgagtggagcatttgtctataattcttctccacctcccaattttacccaagaccgagagtaaacagttaaaatttaaattgcttggattagccctccataccctttctccaccccactttttttttttttttttttttttttttgaggcagtcttggttgctcaggctggagtgcagtggtgcgaccttggctcactgcaacctctgccttctgggttcatgggattcttctgcctcagcctcctgagtagctgcaactacaggtgcgtgccaccatgcccagctaatttttgtatctttaatagagacagggtctcaccacgttgcccaagctggtctccaactcctgaggtcaggcgatccgcccgcctctgcctcccaaggtgctgggattacaggagtgagccaccacgcccgacctccaccccacttttacttcccaccttactttctgtataaactagttagggtattcatttgaaacaaaattaagtttatttacttgtttgcttatgctgcctcccattctgatttttatttttgtaatatgtagaataataacatgctttcaaaagtcaaaattatacaaaaggcatacattgcttttgtatcccttccatgccatttttcttcagttttcttaggtaaccaacttaaatgttttctgtcttatccttcccatttcttttttttgatggtatctgtatgttttatttatttatttatacaaaagatagcgtactatatatactcttgcactttgctttttttcctacttaactgatatctcctggaaataatgccctatcatgccaaagagatctttcccattcatttattttaattgtagtaaaatttacagaatataaaatacaacttttttttcttttaaagactgaatttggctcttgtctctcaggctggagtacagtggtgcaatctcagctcactgcaacctctgcctcccaggttcaagagattctcctgcctcagcctcccaagtatctgggactacaaatgcccaacagcatgcccgtctaatttttgtatttttttttagtagagacaggttttcaccatgttgaccaggctggtttcaaactcctgacctcaggtgatccacccgcctcagcttcccaaagtgcttgggagtaagctacaggtgtaagccattgtgcccggccagaggaccaacttttgattaaattatagatatccagttccagggctatttgtagaaaagatgttccttttttcttggtttgctttggtaacttgattaattgattatatttgccaaagtctctttctggcctctattcagtgccatcctcatgcccatatacattgtctgattataggactttatttatttttttgagatagagtctcgctctgtcactcaggctgacgtgcagtggcgcaccctcagctcactgcaacctctgcctccctggttcaagtgattctcctgccccagcctcctgagtagctgggattacaggtgcccactactaagcccagctaattttttttttttaagtagtgacggggttttgccatgttgtccaggttgatctcgagctcctgactcaggtgatacaccctccttgacctcccaaagttctgggattataggcatgagccactgcacctggctgacttgaacttttaaagtctcttttatttgttcttttatcctgaaactaggaaacaaatacaataccctctccaccagatttcacttggaatacttataaatttggatgaagtcatctcttgttcaggttccctaaatttactgagtcattggctgccactaagtgaccttccatctgtgaagctagtccctgtaaaccaagaacaggtaccaggcccataaacattgacttcttgtataatgtaaaatctttgttttctttttaaaaaaattttttaatttataagatgtttatttaaaatgttttgtggaagtgaggtatcactatattgcctaggctagtcttgaactcctgggctcaaataatccccctgcattggtttccccaagtgttggtgctgggattacaggtgtgagccactgtgtcctgccctactatctttgttatagtggtggacttgtcatacgattatattataattatatgacattatatcattatattgttcttaattataagaaatagtatatgacctagattgtacaatgatttgtccagttatcctggtaaattttatttacctttgtcttgacggaatttgattaagcctatgcaaataacgttattaacatgaaaaaatagacttagtttttactttattttgaggtggggtctcactctcttgacctacctggagtgcagtggtatgattgtggctcattgcaatcttgaattcctggactcaagcagtcctgcctcagcctcctgagtagctgggactacaggcatgcgccaccgctctcaaatgccatttaaaaattttcctacaaaagcataatatattaaattgtgagctagaggtagatgaagaagaaaggaaaagggcttcctcatatagccatcagaaaacagaatattaaaaaataacaccagcctgggcaatatggtaagaccccgtctctacaaaaataaaaaataaaaacattaactgggcattgtgtgtcacatgcctgtggtcccagctgctggggaggctgaggtaggaggatcgcttgacgctgggaggctgatgcctcagtgagccgtgatcgcaccatcgcaccccatcctgggcaagagaccaagaccctgcctcaaaacaaaacaaaaaacggctgggcatggtggctcatacctgtagtcccagcactttgggaggctgaggcaggttgatcacctgaggtcaggagttcaagaccagcctgaccaacgtggtgaaacctctctctactaaaaacgtaaaaattagctgggggtggtgatgggtgcctgtaatcccagctactcgggaggctgaggcataagaatcacttgaaccccagggggcagaggctgcagtgagccgagatcgcaccattgcattccagcctgggaaacagagtaagattgtgtctcaagacaaaaaacaaaagacaaaagaaaaaacaaaagaaaaaaccatagtctgaaacaactggttaaatttctgccactagttcatttagtcctatgcagttaattctgtttctcttaggcttattctgtagtcacttttaagttgtctgcttagatgtttaagatacctagacattttggcctttagtatagttttaaaatttaaaaatgttagctcagtagttcattgcccagagtatttcataaattatcaagatttaaaggtactttgtacagtcttttgcatgagaatcttcaactgtcctttgaagacaaattatagcatatgagtcctcaagggaagcatcggagagtagcagaagccatcacccatttgacagtaagacatttctggtactcttcattcatctttatagatgtgcattttcatctgatgcccctttctctttggcctgaaggatataatttcatttccagaattgtttatcactgattgtctcaacttttatttatctgaaaatgtctttatttcaccctatttttgaaggtttggttcactggatagaaaattctgggttgttgatttttttatttcagcactttaaagttgttctgtggtgttgtaacctcctcccctttttttttttgaagagttgatttttaatcttgttctcagtatgtgtggtctttttttcttgtggatacttttaagattttctttttacgtttggtttaaaatagtttgactatgtatttaggtctagttttctttgtatttatcctgcatggtattctttgagcttcttggatttgtaaatttgtgttttcatcaaatatggaaagttttggccattcttcaagtactttttctgcatctctgcttcaatttaattctccttcctctgggactccaatcatacttgctaggccatttgattttcttttgttttgaggtggagtttcgttcttgtaccccaggctggagtgcagtggtgctcttttggctcactgcaacctccgcctcctgggttcaagcaattctcctgcctcagctcctgagtagctgggattacaggtgcttgccaccacacctggctaattttttttgtatttttagtagagatggggttttgccatgttggccaggctggtcttgaactcctgacctcaggtgatccatctgccccagcctcccaaagtgctgggattacaggtgtgagccaccaggcccagccgaccatttgatatgtttataagtcattaaggttctaaccatttttcttcagtcttcttcctttctcttcttcaaattggataattcttttgatatcccttcaagttcagtgactttttctgccaactcaatttctaagcactattcaacaatgaaatacttttacctcttatttcattcctacagccctgtgttggggttgatagaggcttcagaaaaggtaacaggtttatcaaagttatatacctagtttgtggcagaactgaaattagaacctaacttgattgtttacaaactacagaccattttctttccataatgccatgatctttatcttctaataagttgctgtcagttaaaatgttcatactgtaactggtgtgagtggtggtcctggtagcggatgctacttaattaacaacattgtcaaattgcagaaaattgaagttcttctcatttaaaaaacggttttcagttgaagaatttaagtatcctgaagtcagtaataccttgaactaatctttttagatgacattcctccagcagtgaaagtatgtctgtggttactcaacagaaaaatttaattctaatgacagactgtttttttgagacagagttttgctcttgttgcccaggctggagtgcagtagtgtgatctcctctcactacaatctctgcctcccaggttcaagcgattttcctgcctcagcctctcaagtagctcgggttacaggcatccgccaccacaccctgctaatgttttgtattttgtagagatggagtttcaccatgttggccaggctggtcttgacctcctgacctcaggtgatccacctgcctcggcctcccaaagtgctgggactacaggcctgagccactgcacccggccaccacatacgttttaaaatcaagactttggaatcccagactgcggtatcattcattgtctcggaaattaactctttggagtacctcctcttgagttgatggattttttttttttttttttttttttttttgagacagtctcgctctgttgcccaggctggagtgcagtggtgcgtcgcggctcactgcaagctccacctcccgggttcactccattctcctgcctcagcctccggagtagctgcgactacaggcgcccgccaccacgcccggctaattttttttgtatttttagtagagatggggtttcaccatgttagccaggatggtctcgatctcctgacctcgtgatccgcctgcctcggcctcccaaagcgctaggattacagacgtgagccactgcgcctggccaagttgatggatttaacttcatgaaaatttttaaaccagtttttgtgtcatcttagttaaaataagaacattataaagtttggtaaaggaatgaaagcattactaagccaggataattatcaagtgcctttatataaacattttcctaaaattctagtttctaaagttctgttagaaccttataagataattagtagtatgggaaaagaattactggcataagaatgacattcttagttgtagtaaccgtatatttatatttctccttcagtttattttgaaattaaatttctaaagtttaaaggtaaacattttaattataaattctgcattcatgccttctaattaaaatatgaaccaaattcatagaaatcctataaggcaacgattacttaaaaaccaaacaacttaagtgaattgtttttaggtttgtattgccttatgtataaaaatcaacatttgttgattttgccttggatataacacctctcatatttaaagccagaaaacacatgttgccagatgggaactaggaagagtagtagtctcatcttggcatcattttcttcataatgaccagttcacttgttttacacataatctcaggttctttccagctttaattttctatgattgacggatcagattctacattacggaaccttttagttacctgctaactgctgttacaccactcaagatgcgtgataaccagtcagattagaagatgaaagtcttggccaggtgcagtggctcatgcctgtaatcctagcactttgggaggcctaggtgggcagatcacttgaggtcaggagttcgaaaccagcctggccaacatgatgagatctcgtctctactaaaaatacaaaacaattagcctggcgtgttggcaggcacctgtaatcccagctactcaggaggctgaggcaggagaatcccttgaacctgggaggtggaggttgcagtgagtggagattgtgccactgcactccaggctgggcgacagagcgagactctgtctcaaaaaaaaaaaaaaaaaaaaaaaaaaaaaaagagaagatgaaagtcttcatgatattgctgggcacggtggctcacgcctgtaatcccagcactttggaaggctgaggtgggcagaatacctgatttttttttttttttttttttggagacagttttgctgttgccgcccagtctggagcgcagtaccgcgatctcagctcactgcaacctctgccttccgagttcaagtaattctcctgcctcagcctcctgagtagctgggattacaggcacccgccaccacgactggctaatttttgtatttttagtagagatggaattttgccacgctggccaggctggtctcgatcccctgacctcaggcaatccgcctgcctttgcctcccaaagtgatgggattacaggtgtgagccaccacgcccagcctttaaaatgaccttttttttttttttaaagacactctcactctgtcaccctagttggagtgcagcggcgccatctcggctcactgcaacctctgcctgttgggttcaagcgattctgctgcctcagctccctgagtagctgggactacaggcacgtaccaccatgcccagctaattttttatttttagtagagatggggtttcaccatgttggccaggctggtctcaaacttctgacctcaggtgatccgcccgccttggcctaccaaagtgtgctgggattacaggagtgagccaccacgcctggccttaaaataattttttacaggagatatctatagggataggtcaagaatctacagtccttggctggcgcttaacttgcaaaggaccgtgatttataactggttttaaattttttagactggtgggatcttccacttggtgtggctggaaaagagtgatttattattggaagtccagtaaggccagttctatctaaactgttagaatagctgtaagtgatgtggctttactgagattccatgaaaaaaataaaatatttgatgccatgacataaggctttttttttttttaattttttggtgggattggttaaaagcttggctctgaagttagaatgacttggatttaatttctagctccaccacttactggatgtatgactttgggttgagtttacctttcgatgtctcagtgttttcaagtgaagtagggataatattgaactgtactttcatctagctcactattctgtgtttcatagggctgtcaggaggattaaatgggagtaataagtggaatgcatttatcacaatacctcactcagatgttagagcaagtatttgttcacatagtgattttttactttaaacactaaaattacacattatttttatataaataaagagtatatattatttgaattatgaagtatactttgaaggctattcttgaacccactccttgaactgaagaacgggacggtcagttcgtatagtgtacctgctccctgaatctttcttcccgaagtcatcctgcttctatccttgaagtcacagctatctttgagttaataattaacttcatttaaaaaactttgaaaaagtctcatttggatgtgtccttgaacaatgtttagttttcttgttttttttagctttccaaaaatataatggatgtaatgtggtggctttctaaattgtaagatccaaccatgttgtgtataattcatttttaccatccctgtattgtattcttttgcatggcttcattagaattcatttttcaaatctgcaattgataaacattagagtttcttctagcttttgaagtgtgaacaacgttgcaatgatcattttttgtatctcgtttaaaatatttttattgctctaaagttttaaacaaacttgattttaactgctaatatatttgctttcaatgtggtggtactactttagaaaaagtaaattttctttctttttttaaattttagacagggtctcacactgttgcccaggctgaactgcagtgccatgatcttggcttactgcagcctctgccgcccagtctcaagcgatactcccacctcagcctcttgagtagctgggactacaggcgcttgccaccacacttgactaattaatatttttacatttttggtagagatggggatttcaacatgttgcccagggtggtctcgaactgagctcaagcgatccacctgcctcggcctcctgaagtgctgggattacaggtgtgaggcaccatactaagccaaaagtaaattttcttactgaaatgttttatacattgtttcttgttttattagctaagttatttcatatcactttttatttatcataggattagcaataagcactgtaattttccttaagtacttgatttcaaaaaaccaactttattaaagcataatatacatacaaaatatttaccaaccttacatttacaatttaatgagttttgacaaatgtgaccatcaccacagtcatgatataaaacatttctaccattccctaaagttctttgtgcctctgtgcaatcagtcatctccactggtccctagcaaccagaagaaacctccaactggtctgctttatgtcactactgttttaccttttctaaaatttcatgtgaatagtattcccattttgtgtgtgttacaccttttataattgtcccaccattcttggatattcttttctttttcattttctctttctttttcagttttggggagtttgtattgatcttaaggctctctggtctcccactcctatgtttggtctactgatgagcccatcaaaggcattttgcatttctgttagtcttttttgattctaacctgtgcttttttttttttttttgggagggggagatggagtttcgctctgtcgcctaggctggagtgcagtggtgcgatctcggctaactgtaacctctgcctcccgggttcatgccattctcctgcctcagcctcccgagtagctgggattacaggtactcgccaccaagcccagctactttttgtgtttttagtagagatagggtctctccatattgtccaggctggtcttgaactcctgacctcaggtgatccaccggcctcggcctcccaaagtgctgggattacaggtgtgagccaccgcacctggcctaacctttccttttgattcctccttagagtttttatctctctgcttacattacccatctcttcttgcatgttgtctgctttccccattagagcccgttaacatattaatcatagttaagattccatgattggtttttagatttttagaataaatgtttttaaagaaccaggcttctgccgggcgtggtggctcacgcctgtaatcccagcactttaggaggccgaggtgggcggatcatgaggtcaggagattgagaccatcctggctaacgcaatgaaaccccatctccactaaaaaatacaaaaaaattagccaggcgtggtggcgggcgcctgtagtcccagctactctggaggctgaggcaggagaatggcgtgaatgtgggaggcggagcttgcagtgagccaagatcacgccactgcactccagcctgggcgatagggcgagactctgtctcaaaaaaaaaaaaaaaaaaaagaacctggcttctttactgtttactagcgaactttggaagcatcatttacatgtattatcaaacctgtttttattttattttattttgagatggagtttcgctctgtcgctcaggttggagtgccgtggcacaatctctgctcactgcaacctccacctcctgggttcacgcggttctcctgcctcagcctcctgagtagctgggattacaggtgcgtgccaccatgcctggctaatttttgttatttttagtagagacagggtttcaccatgttggccaagctggtctcgaactcctgacctcaagtgatcctcctgccttggcctcccaaagtgctgggattacaggcatgagccaccacacctggctgaaacctatttttattattagtgctcatgatttctcatttaagaatatacataatcacacagcttacacacaaatattcatagcaacagtattcatagtagcagaacaacaacttaaatttccatcagctgataggtgcataaataaaatgtggtgtatccatacagtgaagtattagccagaaataaaaagcaatgaagtacagtcatgtagcatataacaatgtttcagtcaatgaaggaataggaccacatatatgacagtggttccataagattatactgtatttttactgtaccttttctatgtttagatatgcttagatacacaaataccattgtattacacttgcctgcgctattcaatatattaacatgcagtataggtataggtttgttgcgtaggagctgtaggctataccatatagcctagatttaggctgtattatctaggtttgttaagggacactctgtgatgtttgcacaatgatgaaatggaatgaaggcacatttctcgtaatgtatccctgtcattaagctaggcatgactgaaccgatatgtgctacaatgttgatgtatttgaaaacactatgctaagtaaaagaagccagtcacaaagaactagatattgtgtgatgccatttatattaaatgtcctgaataggtaaatccataaagacgcaaatacgtaagtggttgtcaagggcaggggtgaataggtggaaggttgggttatatgaggttgagggggtgggaatgggagcaggggggaataacagctaagggattttgagttctttttgggataatgaaaatgttctaaaattgattacagtgagagttacacaactctgaaatatactaaaagccagtcgtgcactttaagcatataatatgtgaattaatatctcagtaaagctgttaaagaatctagctgatgtatgcaaaactgctaagaacactatgatgtcatacagaaattttatggaaaaatattactttcctcatgacactgatctcaaaaggtttcctatctcaaacattgttagatttcaaaaataagatgttaattgcactcacttcaaattttaaaaaaccttattcagtctttttatagaggtcatcctgtaattatatggtcaatatgaattccagcagcatatctttttcatgtgtcaagaaagtttacattgaaaagattgcattcttaaaaagaccatacccagatccatctccacttcctgtttgtccactaaacatttgtgagatatttatggctatcttgcgcaatgcctccagaaatcaatgtttgctctcaagtttataactacagtttaaaaaaaattcaccaaaaaattcataatcctggtggatctgctgtttaggactagttagttaagtgcagtatatacaagtagaaaagctccaattattttacttgagatgatctgatggctaattctctcacttcctttgtgtgtgtgtgtgtgtgtgtgtgtgtgtgtgtgtattttatatattttatatatatatatttttttatttttattttttttgagatggagtcttgctgtgttgcccaggctggagtgcagtggcacgatcttggctcactgcaagctccacctcccgggttcacgccattctcctgccttagcctcccaagtagctgggactacaggcgcccaccaccacgcccagctaattttttgtatttttagtagagacaggatttcatcatgttggccagactggtctcgaactcgtgacctcagacaatctgcccgcctcggcctcccaaagtggtgggatttcaggcgtgagccaccgcgcatggccgcatttataattttaaaagcttaaatgtgttttttttttttggcgggcgtgtgggttgggggagatggagtctcagtctgtcacccaggctctagtgcagtggtgtgatctcggctcacttcagcctccgccttccaagctcagtcctgccacctaagccacccaagtagctgggactacaggcgtacactagcacacccagctaacgttttgtatttttggtagagatggggttttgccatgttgcccagtctggtttcgaactcctgggctcaagctatctgccctccttggcctcccaaagtgttgggattacgggcatgagccactgtccctggcaaaaaaaaaaaaaaaaaaagatagaattcaaaaattgtatcttgaatttagtgttgctcatatgacaacttactgtaaaaggtaatttattttaagtataggtcacatactatacaggggatgctttcaaaagacaattcctattgataattgtattttattattaaagtcaaagaatgtcttagtctgctttctggtgttctgttctagtgttctggtcttctagggttagaaactaggtagtttataaaagaaaggtttatttagcacatgattctggaagctgggaagtctgagatctggtcagcttctggtgagggccttgtgccatgtcgtaacaccacggtggagaagaggaaggggaagcaggcatgtgcaaagttaccaacacaagaggtggtctcactttgtaacaacccactctttagtccaaacctgtgggagcaagaactcaagggagtgagaaaggcattaatccatcttaacgacttacttgcctcttaaaggcaccacttccgaataccacatcgcggaccaagcctcaacatgagttttgtggagataaactatattcaaaccatagcaaagaccaaaggttatggcggtttactttctgctaagctttcagatatagacatgaaaatcgttagatcggtaataatatagctttatagtacttaattttgtaacttaattaagaaatagaattagcctaaatatcagctcaataatctaataaaaggtgaactgctgtacaaatagtccagtttgtatcactgttataaatgagcctatctcatgtgccaaacttttagagtaattgccttcttacgattttgtctgtttccaaaaacttctaattggagtatgcttttgaatctgtgtaatatttaacatataaagcctgcattatttagaagttgatattgaaaacctttaaacttctgacctcaaatagaatttgcttatgtataaccattacatgcagctggtgggttcaaaattgcgttttctgggtctctgctctgtgaaaaatagtatgtattggacatgagtacatgacagctgacatttatcaaggataacagggggagccatattcattttcacattttaaagcaactttgaaagctttgcatgtgcacacatgctcaacatatgttcctaagctttaaatatattttccatcatgtattgcttatcattaatataagaaactaagtgtaaatctttaatgagctcaatatattaaacttatatgagtacacaagcatttggaagatcagcaatgcaggctacttcattcatttacatggaatttatcttttatagtttctgtgctattacaaataatgtaacacattccagatagcccttttgttatatagtgtttgatttggcccttctttaatttcattaccataaaattttgtcctgttgtagaagactaaatggtagaaattaacttttttctaaaccaactattgttatattgctgttctctttgccaagctatttatagggctattttactggagggtgacataaatagaattggaatggcataattgttagtctgagttcttagcctttaaaaattttctttaaattgtgataattcaaaaagaattctagaataaaactgtaaagctcataatgttgccaacttgttaattaaaataacaccttttgtggttggtataggtttcagatactgtgaccatttaatatatttatatgcagatcacattgacttgctgcaaggtaacaggagaaatgctttgacttcagaagataaattggccatgcacagctgtaatcctactgtcttttcatttccagacatgattcagtagtttaaggctttgattcctaggcgctgagaagaaagttgaaatttatttttgtgtatgagaatttttacttaggtttttgataagtctagtttgtggtgtgaaggtaccatctaaactgttggtgtttccatacttaaatagctctctcttaattttatttgaaatatgagaagcctgagtttctttccattttccttttggcagttggaaaggaagccatcttattaagagtgatgaatagtgaagggttttttttaggctaaattgccagtgtctttagattaaaaaaaattgcagagcgataagttatgaacgttaacatgatttttcaaggaagaagtaatccttagtcacttgtaacccaaatgcctttcctaataagagttccgtttctacaaattcttttgacagagaagtgtatgatatcagagaggtttttagaaaacattttaagtgccataagaacaattcaagaccactaccaaaacttcatttgaagatcttagcatctttgagaatttagtatttctcaagagacatctcttaaattctcctgtaggcaccaagatttagacaatttgcttaatttattcagctaattaaatgggagagttccctgacccccctcacaggacgtgcgacagggctgtggctcatctgttccgtgctctcaaaccccttttgggaggaggagcatgcgtgcaggcaggtgcaggatctggggcgagtgcccctgggctctgttctcatgggagtgtccaggggtgggagtctgcaactccccaagcccaagtaggcatgtgttacagtatgctctttttgctttgccgaccatggacggcttaagtgttaaacagctcagggccttcttggtattcaggtccttgtccagcatcgaggaagaatcaggtcacacacggacttgaggatggtgaatgtggggattttattgagtgatggagttggctgtcagttggatggatgaggagctggaaaggggatggagtgggaaaatgatcttcccctggaatttggccatccagtggcccatctcctctctgaccgtcctcagccgaactcctcttggtgttcagatgttccttctcttctttctctgccgtgccattctgccattcttctgctcttctgtttgtctccttgtggagccgggggcttggggtttatatgggtacaggatatgggggcgtggtgggtcaaaaggcaacttttaggcatgaaaacaggaatgtttgttctcatttagggtcatgggttttcaggcttgagtggggcctttgccagggaactgccttcttctacccagtatttccctgtctcctgtctgtatcagtaatataggaattagaaaacacaaatatctttttttgtaaactaggttgtagatctgtttgtagttaagaggccaaattccatttttcttaattaccttgattctgtctgtaaatggtacagttcttgagggagccatttttcgagagcctaccatttgccagacatcactgaggttttgttttacctgtggtttttaatcctctcaacaactttgtaaaggtgatggatgtgcattttagagaagatgaaattgagcttcagagatgtaaatttggtaaggtcatgctgagctcaaatcagctgttaagtctgtgttcttttcccctcttcactatgcttcatttaagttggattcgttgttttcttgttcactaatgatgtgtgcttgtgtgtccagtttaggaattaaccttgtctattgattcttggtttcagacaagtatcccatgtctgtctagagtttggctgtggataattgatgatactatcttttcaaattatttataattcgtgaaagcttatagttcttttaacatccatttattcttctgtttctttttatcattcgtaatggctttcaattattattttaaaaatcgagatgggagcttgctatgttgcccaggctggtctcaaactcctgggctcaagtgagcctcccacctcagctttccaaagtgctggcaatgtaggcttgagccactgtgcctggccaattctttatctcattaaggatcataaacatttattttaaaccaatttcaagatttttattaagcattgaattcatcttttgatattgatgaatttcttgactatcttccttagttcagttattttttatttttatttattttttttgaggtggggtcttgctctgtcactcaggctggagtgcagtggcgagatctcggctcactgcaaccttcacctccaaggttcaagtgattctcctgccctcagcctcctgagtagctgggactacaggcgcatgccactacccccggccaatctttgtatttttagtagagacagtgtttcaccatgttggccaggatggtctcgatctcttgacctcgtgatccgcccgccttggcctcccaaagtgctgggataataggcgtgagccaccacgcctggcccattagttcactttttaaatacactttaggattttagtttatggtttatatgctgagtgggaaataatttttttccctttattttggtgttcttttctgtatgtctccctgccacctatacctctgtttttgttgccttcatacatttacaccatgctttcagtctagatctaggattctaattctgagatattattgcaatgttggtgatatgcattacttaggttttgtttgtgtgtgtgtgtgtatgagacatatatatattattattatgtatatattaccttttatttatttagagtaccttttatttcctctacaactgcctgtggcagtttgaaataataactttagctattgataataccttttttcaccttcctttcatgagttttttgtttggtttctacctatgagattttttcgttttacctgtgagccttgcttttggttttcttatcttgtgcatgatttcatttcctgactgcctttgcttgtttcttgtcctggagctcagttgggttcatggagttattaatttattgctttatatttcccctctgtcatggtccacaaatatatttgtcatgtttgagcgtaactgtgtcttttgaagttaatacaaaattcgtattttatctgtcattattatatttggagcaatgggataaggtggtgttgattgatagcagcatttctctgttatcctttcaggaagtctccatgttcttttgatctcacaacatggcttgtttatataggcctgcagatagtagatactaaagcatctgtttatttacttacttatctgcttacttgctttatttacttaccaccacccctgactaatttttttgtattttgtagagacagtgtcctgccacattgcccaggctggtcttgaacttctggcaagtgaccctctactgtagcctcccaaagtattgggattataggcatgagccactgctcctggccctaaaacatttattacatgaacgtggggtatcttggagaagccagacccagtttcaggctctcagccccaaccttaatctaatatagtggctctcaacgtgtggtgcgtggactcccggtagtctctgagaaccttttaagggttctacatggttaagactattctcataataatgctaatgtgttatttgctattttcatcccgttggtgtttgcaccgatggtggaaatgcggtgatgcataaaattgctgacaccttaccatgaattaaggcagtggcgccagactccgctcctaggtagacattgcattcttcactgccaggagctcataaagaaaaaaaaaaatcagttttccactgaggattgtccatgatgaagcagcaacactacacctggccctcattcccttttttccttaagtacctttcactgtacccttaagtactgtcgttttaatgttctgtgtgatgagaatggaaaatgtgcacaaagacttctgcctgccaaagtatgatggctgtctccgggaaaagcacttgcgcagtttgcgttgtgaactgaagtacccacttttttcatggaacaccatttttacttggatgagtgacaaaccatggctattgagtcttggttatttggagactgtcttcaaattgagtgaggtgaacctgtcactacagggaaaacatctgactgtattggttgacagtgataaaatttgagcttcaagtgaaattataagtaagtaaacttgaatcggccaccatgagcataacagccttttattactttcctgatgagatgggtggtgacattaatgaatgtgggttaaaaaaattgtgtaatgaaatgtaccagcatttgaaagatctactttaactcagtgaaccagtattatctaaatgacccggtgtttgattatacagtgatgcatgggttaaagatctgttcagagtgcaagttagatccaatgcattttaatgagacagcatgaaaattcatttatatggtttcagattccactttgcaactgtaggagactagaatataccaccctaaaatatgcctgtttggtgtaaggattattttgagaagcagacacaggagaagttctgaaaacagagtagaagttacccttttgtaagggaaaatttatatctataaaggaaatctcccttgtaagggtgtcttcctcattaccaggaaaaggatgactcaatcactagaaacttactaatggagaaggcatagacttaaatctgtataacaagccttactgttgtttaccatgcttttcttggtcacctctccataactattgctccctagcccctgtgcccttctttatttgtttcagctgaagatgatatttaagtctgaattctaagccacctcttagaaatgaaaagatttactcatttctctgggtatctctcatggatacatgagatatatttattatatttctgattttctcttgttaatttgtcttttgttaaggggtctgacccaacttagaactcagatagggtagaggaaaaattatttttttctctcctataaaactcacctttaagaaattaccagttgttttagtgtaatatcaagaaatatccataattatttataaaagtttattaaaatagtccttccttttacaagtacatgtctttgtgaggccagattttctttatatccttaaatcaagataacattgcaccggattgaatgcagaagtaaataactgttttctattaagtcaggtaattatatgcaaatatatgtttttaattattttataattctcattgtttcagaagttttgttttttgcaaaaattgttatttatgttaatatatgatgggctttaaaaagtgaatgagggccaggtatagtggctcatgcctgtaatcccagcactttaggaggccaggcaggtatatcacctgaggtcaggagtttgagactagcctggccaacatggtgaaaccctgtctctactaaaaatacaaaaattagccgggcatggtggcgggcacctgtaatcccaactacttgggaggctggggcaggagaatcgctcgaactggggaggtggaggttgcagtgagtcaagattgcggcattgcactccagcccagcctgggtgacaagagcaaaactccatctcaaaaaacaaaacaaaacaaataaaccaaaaaagtgaatgagtccggcttggtggctcatgcctgtaattccaacactttgtgaggccgaggtgggagaattgcttgagcctaggagttggagaccagcctgggaaacatagcaagacctggtctgtactaaaaattaaaaaaatcagctgggcatggtggcacatgcgtgtggttccagctactcgggaggctgaggtgggaggatcacttcagaccagcagatcgaggctacagtgagccgtgatcacaccattgcactccagcctgggtgacagagctgagaccctgtctccaaaaaaaaaaaaaaaaaaaaggtgaatgtttcttaagttttaatttctaatatggtgaatactgacataacccacatagcagaagttattacaggtttccagtttttaagaggtaaaggaatcctgagatcaaaaggcttgaaatctagtgaatttggttggaactctagaagcatttgacttaaacctttcaccttgttgtatttggtatcttgtagcacacccagttcctgctacagctgcctctattctgtgctgcttaaatacggaggaggtctgagctaaccaatctgaagtttggccaatttcaggggcatttagttgttaacctgaatctacttcttttattagtaagaaacatatctactatagagatttaggactttgaacagctgtataacattataggatatgtctggtactcagttgtttctgtttctgaatcacaaatcggccattaattttaaataaagacgttttgtagcatataatacaatttctgatgatctacttactagtttgttaattcctcacaccgagtcatcagctccttgaaggcaaaaaaattcctgttttgatcaacaattcatctaccccaagcacttagcataggggatactatttcctttttctatgtggatgacacccgatatgttgaacagtgaccactcttaagatacttggtgaagtaggttttggttttaaccagtttaggtgtatggatgattttacagaagttcgtaataaaattttcttgcctcagatattctctaataataatgaggtgcccccagcttcatttactagacatggataggcaggttttgtgaagtacagaaaaaaagttctttaaagttatggatcatgtcacgaggtcaggagtttgagaccatcctggccaacatggtgaaaccccatctctactaaaatacaaaaaaattagctggttgtggtggtgcacacctgtagtcccagctactcaggaggccgaggcaggggaattccttgaactcgggaggcagagattgtggtgagccgagattgcaccactgcactccagcccgggtgacagggcgagactccgtctcaaaaaaaaaaaaaaagttatggatcatgaaactaacatttgaatagcaacaaagaaaaaaccaagctatgttgtattttattttttatttttattttttaatgttgtattttaaattgaatgatgtacttctcctcctctttgcagtattttatatttttgcttactgcacatttcttccctgaagcaatcttgacctaatggtataaatgtttagctccacataagacggtagctattttttggagaggaatggagagggtcaagggttttattgagttttcagttctgataccttttaacctttttaccagtgctaccccaccctccagaaagcaaataatgttgaaagctttttttattttttaactttttgatatatattttcttattcattatttgtattgttgtcatcagatgaataatggctttagagatttatttgaaaagacaaattctattatcagacacataacttctagggatatggaaactattattattgttactgttttgagacgggatcttgctctgtcccccaggccagagtgcggtgatcatggttcactgcagacttgacctcctgggctcaagtgatcctcttacctgagcttcctaaatagctgggaccacaggcacatgctgccatgcccagctaatttttgtgttttttgcagagacagaatctcactatgttgcccaggctggtctcaaactgctgggctcaagcaatcctcttgccccagcctcccaaagcgttgggattacaggtgtgagctactgaaactggcccggaaacatttttaaaaaaggattcttttgaatttaaagttatttaatgattactgaagagtaataagctgtgaggtcaggaaaaaaaggactgagccacagactaagcagcagtacagatgatgacctattcaggaagtcttgtgagtcagacttgccgtgtcgtgttgctagagttacagatctgctccaacctctttgctttataagaaggacatctctctgttctaccttcaatatcttttctttgaaaaatcaacccaaaagtcttttattagctttacatttatttctacagtcttaatttttgtaacatcagtgttgcaggtgaacaaactcattgtagcctctatttttgatattgctggacagggctaactttagtactatagtgggaagtttgttattttgttttttactctacaggcactctggtttaggaatatttatctgtcttgcatttgaccatggttaccattccccctcttcattgtttacttagtgtaccatggtacactttatgtaccatccttgctgctctcagctgtttggttaccaggtggctaatgttgtcatctcttaagctttaacatttacttctcaatactgtcttttcctctgtgaggtagatggaaagaatagattagaagagaatggggcatatgctgtgatcatctctcctttacatctttattgcttattaatttaatttatatcagatttcatttctgctctgtgcacatacccactgtccctcctcaccactcttctttatccagttctttctcacttaccttagcatggctaaaacccttggtttttatttatctctttcttcctctgctgtttttattttcattatatgccacagggacaaacttaggtataagtactacttttgatgtagagatacttatgtctgtcaaaggaaaattaaactacaaaccccagaggtaaaaaatggtacacaatactggggtttaaaaaatctcctcctcggccgggctcatgcctgtaatcccaggactttgggaggctggggtaggttggtcacctgaggtcaggagttcgagaccagcctggccaacatggcgaaaccccgactctactaataatacagaaatgaggtgggtatggtggcagctgcctgtaatcccggctacttgggaggctgaggcaggagaatcgcttgaatctgggaggcggaagttttagtaagccgagattgcgccactgcactccagcctgggtgacagagcgagactccatctcaaaaacaaaacaaaacaaaataaaaaagccccactccttctgcccctccagaccagggtctcactcccttcacccaggctggagtgcagtggcgcgaaccttagctcactgtaacctctgcctcctgggctcaggtgatacccccacctcagcctcccgagtagctgcgactacaggtgtgcgtcaccacgcttggctaagtgttttgtattttttgtagagacggcgttttgccactttgcccaggctggtcttgaagtcccgggttcaagctgtcctctcatcttggcctcccaaagtgttgagattacaagtgtgagccaccacacccagccaaattatttctttttacctctgtaaaaggagaaccttctctgtattttaagaagatgtggagttggtcaaaagtacagctgatgggaaagcaaaggagaactggagtttgaaaagagaagaggaatggtggtagttaaaaaaaaaatttgtaaaaaatagagttacatacaagtttacacaatggtttagagcttacaaggtaggaagcagagacagaaatagtgtaatatgtaaaatgttatagtaaaaatatggaaaatgcttaggataaagaagggaaaacttttgtctaattgggagagtcggggatggttttaccagaggtgacaaattaatcttgaagggcaggaatattctagatggaaaagcgatgtgggaaagattaaaaaaaaattagtgacttaaggttaaaaataaaggaaatgtttcagttacctttattaaaaacttttagtataaagatcattttggggttgctggtggtgattgatgaggaagaagtatgactggtaacaggttgtttaaactgaagccaaattcaggtttatgaagctcagacttaagtctgttcttatatatgagatagattcagtgtattaaattgtagaagtcaatgtaacctttaaaacaaaagagttacccggctagttagtatgctgtcaggagagggtaacttgatttggatatggatggaattggctcccttaactccctctgtacagtgtattatctgtgaacttcaactctgttgctcatgtagaggttgagaagtctcttggcagcaagtttccagttgcaactaacacctgagttggctaattggtatgcccagttctagcactctagtctctggggagtttatgtttaaattcaacttcatcaggtttaaactggaacataaatgtgcaagaaggaagagagaatggaaccttgcgcataaaataatttacattcagatgcttttctgttcaatttatatattaaaaataggatgttttactttattgtttcttgctagcccttcactcaatatgctggcattataaagcaaagatagtggagaagaaattaccaagaactgaagttgtactgttttcttgtatacatctccaccaaggtagtttcttgtagataccatgtgtatgttttgtttctaaaaactgtaggctcctagctttgctattcattgtgttcaaacgattccttctttttttttttttttaacacttaccaaatttaattgtttttctgttttcctgttctgctagcctgagagttctagtaattggtagtgacatttatccctgttttctggggctaaaatgattctgggcatgcaaaacgtttgagctgaaatggaattaaattgaaaaaaaaaaaaaggattgtgttatactttatcctacaaaacataatagcaaattatcagccacaaaacaaaaggatataaaaaatttccctctctgacagaggatgaggaagcaaaagaaaaataaataagtaggccaggcgcggcggctcacgcctgtaatcccagcactttgggaggctgaggccggtggatcatgaggtcaggagttcaagaccagcctttccaagatggtgaaaccccgtctctactaaaaatataaaaattagctgggcgtggtggtgggtgcctgtaatcccagctactcgggaggctgaggcaggagaatcgcttgaacctgggaggcggaggttgcactgagattgcgctactgcactctagcctgggcgacagagcaagactctgtcttaaaaaaaaaaaaaaattaaaaaaaattttcttttctttcccctcctacttatctcctcacagctcttaacttccttaccagcattgaaagaaacaaaggtaggaggagatactaactggaagagtcatccacttgaggaggaagcttttataacagttccacgttataaaagctcttccctgccttcccctgtcctttacacacgttatatttgtcttcagtcctttctccgtggtaccagttctcttggagctcctcttattttattagtaagggtatgaatgacggattgaaagaaagaagattaagaaactttttgatatttttagggtagagaaaaaaaccttgtaagattaagcccttgtgttaactagtagtggttattttctaagttgtctgattaggaatttgagaatttggaatttcagttttgggtagaacttttatgtatgactgtctcattcttcccaagaacttgttttttctgattgacttgagcagtctctgcttttgcatagtgcttgaagcagtttttaataaaccagttcagatccatagctctttgaaaaaatttccataagttactgtgattctcaagaaatacaccaaacctctctctaattagtgtatttaatcataccttgtataagttagggaaacaagcctgacagataaactaaattgctgctgggatagtcaagtggctccaccatttaatgatagcaaaccaaagaataacaatacttgactgaccattttaaggtatagtttgtatatgtcgatctcaaattttccttttgctgtgtgagccattgaccatctcaagtggaagtaagggttatgggtaatattagaccaccacgaagggcagtttagtgacatcggtgggtaatggttaggtaaggtacttgaggggagcattagtatctgctgagcttgagcaactccttgcctctgtccctaatactgcatgcccctaaactatggctgtcataacctctcagtgttcttactgataagctgagaaattttctggctaactggttggctatagtgtgattcagtagtacaaatggcttgttttggtggtggtggggaataaaatgcccaagaaacatttgatacatattttgttggttatgaagtctgaaaaaatattgtagttccagctctgccatccagaatctgtgtgtgctctagtggaaagttagccatttccttatctgtaaaatgggactattatagtaatacatactctggagggtcatggtaaataaattacagtatatatgagatgtctagtattgtactaccacaaaattatctccttatttctcccttattaatttaggaaaagtaaaatattttagttggtttctatgtcaatttagatttactggataacccatctgctattttggcacactatagctttttttaggtccctcaaaataacttcttgcttgcctaatgaacactggtagtgttgattgatatcttttccttttggacagggcgtagttcctgtatccttgtccatttagctaatttgctgtgtataatcaaactttttccctcctgtcttaatcccaaataaccaaaaggaaagctgattagtgctgctaagccatataccaaaattttcatggtttttgagctagcaggtataattctttgctgcttttcagctttaattagttagttattccatgaaagttcattttctaacaatttattatatattctgttgatgtctaagcttcaacatgttccatagcttgaatgttacgtatagaaaggcctatagtatttataggaaacattctatccagttgttgtaagatacttgttcattttaaatcttatcatggatatactttggacttttccatataatatagaaatagcgttagattttgatagcattgaaaggtattctcattgttactattctacattaaagtaattgtgacgagacgtggtggctcacgcctgtaattccagctctttgggaggctgaggcgggtggatcacttgaggtcaggtgtttgagaccagcctgaccaatatggtgaaaccccatctctactaaaaatagaaaaactaggccagggtggtggcaggcgcctgtagtcccagctactcaggaggctgaggcaggagaattgcttgaatctgggaggtggaggttgcagtgagccgagattgcaccactgcactccacccgccccccgcccccaccccccgccccgccaaaaaaaagtaattgcatggaatatattgcttaaatgcaggtttttttttttggacggagtttcattcttgttgcccaggctggagtacaatggcacaatcccggctcactgcaacctccacctcctgggttcaagcaatcctcctgcctcagtcccccaagtagctgggattacaggcatgtgtcaccacgcccggctaattttgtacttttagtagagatggggtttcaccatgttggtcaggctggtctcgaactcctgacctcaggtgatccgcccacctcggcctcccaaagtgctaggattacaggcgtgagccaccccgcccagccttttaaaaatgcagtcttaaagtgtgcattgccatatttaatacatttaagtagtgtagcatacaactttttttagtggaaacattttagataaggaaaataattgtaaaaatggctcatggatctggatgatagagtttatattgaaagattgacttggttttagcctttgaattctgataaaatgagaagttcttccttccagttcttttctgtactttggtgccaggggcttgaaaaggcttctgagactggattgtgtatcttcttggaagtgcattagaggtgcagtggaaacttcaaaatatggatgcatctcacaattggatgtatgatgtaacttcaggaggacagattacttggtagcaagtataggtcctaatttcttttctattcaactataagtgataatatctaattgtagggagtcagaattaagaagggactctatgttaatagactgttcttttttttcttttttagacggagtctcactctgtcatccaggctggagtgcagtggcgcggtcttggctcactggcaacttctgcctctcgggtttaagcttttctcctgcctcagcttcctgagtagctgggactacatgtgcatgccaccatgcccagctaatttttgtatttttagtagagatagggtttcaccatgttggccaggctggtcttgaactcctgacctcaggtgatccacccgcctcggcctcccaaagtgctgggattacaggcgtgagccaccgcgcctggcctagactgttcttacaatcaaacttagtgtgagactgttgtgctatattatttgccctttgaagatggcttttatcaactacatatattctccaaactagatgggttgtaatttaagatgtaaaaatgtaagctagtctcaggtagttactgttccatgtttcttaccggttaagaacttcatggtcttggtacctgccttattcccctctctcatcttcattcttgactgttgactgaaagtgatctagatctattgtgtctgtgctaggcatttaccttttatatcttaatctaccaaaatagcatatcctcccagtgagaaggagataacaggcgtggcaactaaaacaaatgccatttttgattttttgtttatagctaagattaataccaaatagaaaactgtacctgaagggttagtcatagtcatttgtgctcaggaattattgtatatattgaaattattattttggggaccagaaatgcttttttatttctcatgttgaacattttctttagtttaatgaaattcaggagatgtttgctctactttgctttttgttataaaacaatttgtcatttactcttagacattgtggtatcttatacagttgtacagtaaatgtacctaagttttgtccatgtctaattaagaactacaaatctgtccaacctgttcctaaaaaacccaagatagagactggacatggtggctcatgcctgtgattgcagcgctttgggaggctgacgtgggcagatcagttgaggtcaggagttcgagaccagcctggccatcatggtgaaaccctgtctctattgaaaatacaaaaattagccaggcgtggtggcacacacctataatctcagctactcgggaggctgagacgagaatcatttgaacccgggaggcggaggttgcagtgaactgagatcatgccactgcactccagcctgggtgacagagtgagactcttgtctcaaaagcaaaacaaaacaaaaaataagatagaaatattttatatcttaaacaattatacctttatgttcgggtaaacacctttttcatgattttaagttattattttcccttagttttttttttttttttttttttatagacagaattcactcttgctgcctaggctggagtgccaatggcccaatcttggcttactgcaacctccatctcccaggttcaagcaattctcctgtctcagcctcctgagtagctggaattacagacatgcaccaccacgtttggctaattttgtatttttagtagagatggagtttctccatgttggtcaggctggtctcgaactcccgacctcaggtgattcgcccatcttggcctcccaaagtgctgggattacatgcatgaggcaccacacccggccttcccttagtacctttttggataattaggttggactctgaaggagtaagtttggtagcaggaagattgcacaggcttatgtgtacagtgtagcttgttttgtgagatcaagagaaaaagctgcatgtgtctatggacatagctcgacatatttaggtttcattatatgcacataaacattggcttaacacaaatgatctgcatttctggtttaaactgatatttgtgcttattaatttttttgcatattaagagattgtcatgacttagtttttctattgatttaatttatgctgtcagaatttattgtaacactatatcaactgtagaagtaaacatttaaaaagtttaatgcagtaggattgcattgaatgattgttatagatcagaataaaggaaatttctaaactatgatttagtaggttgaatgttgcttttatatttattcaatatttattcaagacatatattgaccacctattacatggtaggccccttactccttactgagtattcaacttatatttaataacaaaggaaataatattgagaatataggcaaaattttatctttcaaattaaagaagtgctgttatccatggaatagtttctccatttgtttcagggattcagcttataaacaaaagccaaagtaaggaaataatatctagaatgtggaataaattacatatttaaaataaagaaatgtaggctgggtgtggtgggtcatgcctgtaatcccagcactttgggaggctgaggcaggcggataacttgaacccaggagttcaagaccagcctgggcaacatagtgagaccctgtctctccaaaaaatacaaaaattagctgggtgtggtggtgctcacctgttgtcccagctacttgggatactgaggcaggaggattgcttgagcctgggaagccgaggttacagtgagctgagattgtgccactgcacttcagcctgggtgacacagtaagaccctgtctttaaaaaaaaaaaaaaaaaaaagttattactcaatggatagtttgccattcaatttaaaaatcacctttgaatgaaacaaatataaaaccaattatagagacataacaagaattattctatttttgtacttaaggaatggaatcactattctttttatttttattttttgagatggagtcacactctgttacccaggcctggagtgcagtggcgggatctcagctcactgcaacctccgccttccgggttcatgcgattctcctgcctcagcctcccaagtagctgggactacaggcgcctgccaccacgcccagctaatttttgtatttttagtagagacagggtttcaccatattggccaggctggtctcgatctcctgaccttgtgattcacccgcctcggcctcccaaagtggtgggattacaggcgtgagccactgcacctggctctttaattattcaatttattattattattgtttttaagagacagagtctcactcggtcacccagtctggagtgcattggcgtgatcataactcactgcagcctcaaactcctcaaacaagcagtcttcctgttttattcctaagtagttaatgctataggtgtgcaccatgatgcctggcttatttttaaaaaaattttgtagagacagggtgttactgtgttgcacagattggtctcaaactcaagtgcctcaaactcaaactgcctgagcctcccaaagcactgggattacttgagctactctttttaaatatgaaaattggaaaatcaaaaccgaacatacctttaagtttaaaactcttttatttgaggataattttaaacttaaagcaaggttgcaagaaaatagtacaaagagtttttacgtttatctcccccccgggtcaggattcacctagtgtcaactcccttcctcatccttgctctgcctgtccccattcccaggtttattcactcactcattatatatgcaatttttcttaaccatctgaggataatttgcatatgtaatagcctgttaccccaaatattatactaagaatattggtctcttaaataaccgtcgttcatttatcaacttaagtgtattaatattgacaacatacttttatgtctattgtccatattctaattttgtcagttgatccaataatattctttatagcattttcttaccctctagcacaggattcagtctaggatcaaatattgcatttagttgtcattttcttatagcttcctttaaaatctggactgtttacagactttctttgtcttttgtgacattgacacgtttgaaaatacaatacccctgagattgtgtgatctgactgtgccactactaataatagtgagccactactaataaaggttattttaagtctttttctgtccttcatttaaacttgtcatggggaaaaaacaaatacttaaatcatctcagctttttagcctttccattttacaaccaaagttatagaatgaattttcttggtaatttaatacatatttagtgcatctgtaaagacaatgttgcaatctagattttctgatttatattatgatcatgtgattttttaaatttttattttttttgtttttttgcttttgattttttttttaaagctacacatttgaagtttgatcagcatcttgagtgaattttttcatttttataaatctgtcttccttcctggtagcattctgccacctagtggaaatttatgtcctccagcatacgtctcagagtttagttggaatgcaagatgcattttaatatataaaaattagtttagaatcgttgaacttctttggttgacatgtaattctttacaacagtgatcgtcttgttttaaacaagagtttagtacagataaaattcttagcaaatgagggcttagtagatgtcttaaatcatctttctcaacaagaagtactctacatttatcttcttcatcaatgaaattttaaccaaagcatactatttttccatcagtcaaatttttttttttttttttgagacggagtctagctcttgtcacccaggctggagtgcagtggtgccatctcggctcactgcaacgtctacccctcggttcaagtgattctcctgcctcagcctcccaaataactaggattacaggcacctgccaccatggctggctaattttttatttttagtagagacggggtttcaccatgttggccagacgggatttcaccatgttggtcaggctggtctcaaactcctgacctcaggtgatccacctgcctcgacctcccaaagtgctgggactacaggcatgagctaccgcaccctgcaagatacacatttttagtaggacttgaggaacatttctgtcttggagtacatacgttctgcataattcatattagaatatgaaatctgaggttgtcttcagtatagtcatttatgaaaaagaatattgagaattatctgtttagagaaagtagttctgaattaaaagttgcagtcattcagtcatataacaccttcatagagtcatgtatattttttaatgtacttatcttatttctcattattctctcttagttgctgatgtatattcaagatgagtggattaggagaaaacttggatccactggccagtgattcacgaaaacgcaaattgccatgtgatactccaggacaagggtaggtgacttatttcctggtgctttaccacacttgttgtgcctttgtttaaggataacattttaacttcttgccatttacattctctggttagattttttggtggtttcacttcgtggtaagtagagtgttactgatgagatggacatctttttgatgtaatagaagttttttttttattgctgattcatatagaaggtagaatattaacaattcgcggtactataagaatttctgaatggaaggaggggtaggagttacgaatagatgaccaaggttatgtcacgtgcgtccgtgtgaagagaccaccagactttgtgtgagcaacaaggctgtttatttcacctgggtacaggcaggctgagtccaaaaagagagtcagcaaagggtggtgggattatcattagttcttataggttttgggataggcagtgagttaggagcaatgttttgcgggcggggttagatctcacaaagtacattctcaagggtagggagaattacaaagaaccttcttaagggtgggggagattacaaagtacattgatcaagttagggtggggcagaaacatcacaatggtggaatgtcatcagttaaggctattttcacttcttttgtggatcttcagttgcttcagaccatctggatgtatatgtgcaggcttggtctcagaggcctgacagttataagtaagaatctttgctatcttttaagaatgggttataagttgatattttgtcatttgtgaggttgcatccttttttttaccaagtgaaatgagaagcttaaaaattagaaacaaaataatgtaatctatataacactactctatagcttttaaagtatttgccaaagtcagtgtcaattgaagtttaatgtgctagttgaaaaatatcaatctacaatgaataaaacttcatcattaataagtagctaccactgtttttgttcttatttgttagttgttttattatctctaagaagtaaagatgatttattcgtattttctagatgaagtaactgaggctaactctgcccaaggccacctagctaacaaagatggaactgaatttaggtttacatgaatctctattatgttgtactacttctccaagacagcatttttgatagtttatattggctgagtttagtttgtttacatatgaaaataataggccgggtgtggtggctcatgcctgtaatcccagcactctgggaggccagggtgggtggattacctgaggtcaggagttcaagaccagcctgaccaacatggtgaaacatcgtctcaactaaaaatgcaaaaataagccaggcgtggtggcgcatgcctgtaatcccagctactggggaggctgagtcaggagaattgcctgaatcctggaggtggaggttgcattgagccaaagtcgcaccgttgtactccagcctgggcaacaagagcgaaaactctgtctcgaggaaaaaaaaaaaaaagtaatcatgtaatagtgttgtataggggctgattctgctaacagctcttttgtgatatatatattatgtctcctttcccccctttctacgccttttcccttagtcttacctgcagtggtgaaaaacggagacgggagcaggaaagtaaatatattgaagaattggctgagctgatatctgccaatcttagtgatattgacaatttcaatgtcaaaccagataaatgtgcgattttaaaggaaacagtaagacagatacgtcaaataaaagagcaaggtaataaaaacactcatgtctttttgaacagtggtggttcccaacctttttggcaccagggactggttttgtggaagccagtttttccatggacctggtagaggggatggtttcaggatgattcaagcacattacgtttgtggtgcattttatttctattatggttacattgtaacatataatgaaataattatacaactcaccataatatagaaatcagtaggagccctgagcttgttttcctgcagctagatggatccatctgggggtaatgggagaaactgtgacagatcattaggcattagagaatcataaggagcacacaacctagattcctcgcatgtggagttcacattaagatttgcacacctgtgagaatctaatgctacttctgagctgacaggatgtagaactcaggtggtaatgtgagtgatggggaggggctgttgttaatacagatgaaactttgctcacttgcccactgctgacctcctgctgtgcagccccattcctaacaggccacagactgatacttgtctgtggtctgggggttggggacccctgttttagaaggaacttgttgctatatttgcctttttgctcctttgtttgggtagagactacaactgatggaggctagcaagtatgggaatagacaaatgtgttgaccagctgtgctttttgttatttatgtatttatttattttgagatggtgtctcgctttgtctctcgggctggagtgcagtggtgtgatctcagctcaccacaacctccacctcttgggttcaagagattctcctgcctcagcctcccgagtagctaggattacaggcacctgccaccacgcccagctaagttttgtatttttagtagagatggggttttgccatgttggccaggctggtctcaaactcctgacctcaggtgatccacccgcctcagcctcccagagtgctgggattacaggtgtgagccaccgcgctgggcctccagcttatgctctttagagacggttaacagacaattgcctgttatttggtagttccttttcaggaagctgtgggatagtacatttagtagtgaaatgatttaggtatcttctggcttcctgggcaactatgaagtttagttttgatgttataatattgtagcatcattctcttatgaggaaatgttttgtatgtatgtatgggcatgtgcatgtgtatctttatgtctcttctggggactattcgaaggtgatttaatctataactgatagtgtgttattcgttataccaccttctgtcttttcaggaaaaactatttccaatgatgatgatgttcaaaaagccgatgtatcttctacagggcagggagttattgataaagactccttaggaccgcttttacttcaggcaagtataaagattttaactgtccagtaggctgtattgccctttggtttattataaagttataaaaaatcgatgaaattttggttaggaaatgagaacaaaaagaaaacatttttttctttgagacagttcagtattctgaatatgatggtaaaatgctcttataattacaatatacataattcaggaagccttgcccccctagtaaaaatatagttgcaaactgaggaaccacacatatacaaacataaaaatataagcaagcaggaaaggaaaggtagcctgtaatttcacagagatatttgggtacaaatggcccttcatatccatgggttttgcaccacagatttggaggctgaggaagaaataaaaaataatgttaaaacaataaaaaacacctcagtgtgatgactatatagcacttacattgtattaggtattataactaatctagagatgatttaaagtatattggaatatatgcataggctataggcaaatacaccattttatattggagacttgagcatcctcagattttgctatctttgggaggtcttggaaccaaccttacacagatactggggtatgatgactgtacgtttcggctcagacatttttggtgaatttttgcgtgattgatcacatggcacgctatggttttatattcttgaggaattgttaagacttaaacatgtgctttgtatttgtttaggggctgaagcccttcataaagttaacttgtcaacttctttttgtttcaggtagtttgttccaactacttttagttgatcagttttgaaattcctctttgtaaattctcattaaggaatagtagagcagtttctgtagcttgacttggcatcaaatggaaaaatgggaagagctaaggatgcttttctcatttttaaaagctcctttaaagatataattctttaaaaattaggttagacattaattcagatttcatgctgaacatatttatgtacacactcccccacccccaattattcttctttttttttccccccagtaaggcctgtagtaatggtgctaatgttagtagtaatggtggcttatagttgtttgcagtaattaagtcagcagtagtttttacacattctacttactactgtggttgctgtttgctgatactaccataacaaaataccacagacttggtaggtgaaaccaaataaatttatttcttacagtgttggtggctggaagtccaggatcaaggtgtcagcaggattggcttctccttggcttgtcactgtgttctcccatggcctttttctctgcgtgcacattcctggtgtctttctctccccttataggataccagtcatattggattagggtccccaccgttatgacctcatttatctttaattacctccttgaaggtcttgtttccaaatacagttacactgatggttagagtttcaatttaagaattagagggaggaggatacaattcagtccataacagcctgtattaacatatcctattttaggcattggatggtttcctatttgtggtgaatcgagacggaaacattgtatttgtatcagaaaatgtcacacaatacctgcaatataagcaagaggacctggttaacacaagtgtttacaatatcttacatgaagaagacagaaaggattttcttaagaatttaccaaaatctacaggtaggcttttaatgtgtattttctaaataggttaaatttttttccttgaccatttcttagaaaattgaatgtatcttttaggaagtcaagcgatcaaatgagggtagaaaggcatgtgatttaatagcagaattttcacatatggagtcagtgaattaaaaatttggtatacattttaagaggcatatagttacaaaatatgcagtgagatttctgttaaagttgaaattattcacatgttttgtatattgccagcctgaaatgttagtatagatataactatggaaaacatgcataatgagaaaatgcagcttgaattcttgatgatggtcatagaatgagttaccagctttttaaaatgtcatttcaatttgttttccaaagttaatggagtttcctggacaaatgagacccaaagacaaaaaagccatacatttaattgccgtatgttgatgaaaacaccacatgatattctggaagacataaacgccagtcctgaaatgcgccagagatatgaaacaatgcagtgctttgccctgtctcagccacgagctatgatggaggaaggggaaggtaagagctattatatgtttgtgatgttcatgaaacaaatagtggccatacttggagttttgaaacttgtgttgtaacccttcttactgaattccatgtctttgcttgcctattgaacatatatatccaaaagttaagtataatccttaccagggtgaattttttattgtagatttgcaatcttgtatgatctgtgtggcacgccgcattactacaggagaaagaacatttccatcaaaccctgagagctttattaccagacatgatctttcaggtaaaaactctttttttgtctctctctctctctgtgtatacgtacatttttattttggaaatttttgtaaatgttactatttttaatctgtactatcatagaaatgtatacctactgtaatgagtgctttatgtgtatcttttttcatgttgcttatgcaaccttaaaagaatttcactaaaattcttggcatttgaattgggtatgtttggcattttaaatcccccagataaattaaaaaaaaaatttaggggcacctggttttctctccaaattgcattttgcgtcagaatttagtatttctttaacttcaagcccatttgtcataaagaaacatgttttaaaaaattataagtaatttaatgagaattattgggagtaattcctttttttttttttttttgttgagacggagtcttgctctgttgcccaggctggagtgcaatggtgcgatctcggctcactgcaacctccacttcttgggttcaagtgattttcctgccatggcctcccaaacagtttggactacaggcacgtgccaccatgcccggctaatttttgtatttttagtagagatggggtttcaccatgttgtccaggctggtctcgaactcttgacctcaagtgagtcgcctgcctcagcctcccaaaatgctgggattacagttgtgagccactgtgcttggccgggagtaattcttgacgtcaacctgagtttcaatcttggtctgccattttttaatcatagaaataaaaaattaaagacatcgtggttgataagatgcattaatgaaattaaacactgtggcaatattatttttatttaccttcagggttactcttatggtcacctaagtgtaaatggggatgccaagggtttgtcatatatgccccatctcagagataaagaaacagaagcttggtgacagagattgggttattgtccaagatcatggctaataagaaaatttatagctgagtctgcctgacttagcctgtattctttgctttgtgtaacactaattttacaatgtggacttttaacaagtgatataaaaatggagtaggtatacataaaacatagctatcactattacatatgtatgtgtgtgtttgtaatatgtatatataatatacataatgcagaatatttttaaagaaatattgctatttttgcagtcattcaatcattttatgccatcagtaacctatcttcaggatttttgagattaattttcacaattaaaagtagcaaaggattattttgacaattcacagtataatcttgtttacgctgatggatgttacttttttttttttttgagacggagttttgctctgtcgtgcccaggctggagtgcaatggcatgatctcagctcactgcaacctctgcctcctgggttcaagtgattctcctgcctcagcctcccgagtagctgaaattacaggcgcccatcaccacgcctggctaattttttacatttttagtagagacagggtttcacaatgttggtcaggctggtctcaaagtcctgacctcaggtaatccgcctgcctcggcctcccaaagtgttgggattacaggcatgagccaccatgcccggctgtatgttactttatatttgaacattttctctgtattaactcccctcagataaacatagtgacagcaattgttatatattattttatccttttagagtgagtctttctctgcacctcttatgatttggcagtgttaattttctacttgaatagccatgttttacatttgctactgaagatactaaataaaatatctttaagcaatttagcaagtagcatctttgaaaattatctcatcagtatataaaagtgatacatgtttattataaaagttagaaattaccaagcatgaaagaaaacaggacatgatggagaaaaaaattgccaagcaagaaagatcaaatgctttgtgtgattaacatcatttaaaactgagatcctacttacttttgacctctggggatattttatcttctgtccctgatgtgtttcatttaataaactttttatggacatctgttttgtatttgtcatgtggcccagggctaaactcaggagaggtggttgaggacaaatcatgtctattttgggcacgagtgcacaggtatttactctttcccagaatgcgtttatcccttttccctagtctccccctgctactaataagatttttggtcaccattaaaattctgaattttaaacagattattggactggtggtttatttctgtcagcttattcaatattagtgccttttaaatctccagtagcttttgcagaattacctttcactatgaagccccatgagttttcccaaaccaaacttggttttcttcagtatgttttctaatgaatatgtcatagaaaggataaatatatgggcaagactttttttttttttttttttttttgagacggagtctcgctctgttgcccaggctggagtgcagtggcgagatctcggctcactgcaacctctgcctcccgggttcaaaccattctcctgcctcagcctcccgagttgctgggactacaggtatgtgccaccacactcagctaattttttgtatttttagtagagatggggtttcaccatgttagccaggatggtctcgaactcctgacctcatgatccacccacctcggcctcccaaagtgttgggattacaggcacgagccaccgcgcctggcctgggcaagccttttcaatgtctttcctaatttgtctggagtcagtttattgcccacttctttcaagttatttgtctgtaccttttgggtcacaacttccatcatcattgggatttggcatatctgttggtgctgagcataagagattgcccaagtctgattattgcatttcttagtaaaacctatacaaaacagataactattggcaatcttgacatcagcaggagcttcctatgaagtctgccatgtttaaccatggagcatattttgtcacagaaaagattactgaggatgtccaggtcaaaaactgtgtgaccagttattatggcttggatcattctgtctgcattcaaagacatagaaaaggcctgaaagctgatccaagaccagccatggaagctggtcacatagtttttgacctggatgtcctcagtaattagtctgaattttctaagggcagtttcatcattatgcagatcagcaaggttcatttcaaaaacacagttcttgaggccatcagatgcagttttggttccttgagcccttttgactagtttgttaccaattaaacacagctggtgctttcacatcatatcagtcttttttaggaaatggattaaccactttcttctttgctcccattctgccactttttgtaaggcacttgcttttgccaaccaccctagtgctgcttagagtgaaaaggcctagacagtttttaaggaccatctattgtcatgaaaccttctttaatttcatagtatttttgagtatgtatatttggtgtctccattgtatttgatattaagcaaaagttgtcagaagcttccagcattgtagaaatgagtatttggttaaccctccaagtttaggtattaagtgtacaaaaatgtgatcatctctcagatgcaaataattgtccctgctggcttactttaagtaggtattttctcttgcttatagttgtagggacagaatctcttcggacaaacaactttcctcataggcgttattttttccctttacacgaaaatgaacttaaggttatctggacatgtatattcagtacattcagacagtaaaaggagtttgtgtgatatatattctgtacagcatttgggaaaacactgtttttctacactgccacaccacttctgaccccagatgtatttttttctacactaaccagcgctctgtctgacataagctgggtgccctacaattttagtttggacagtttctacctgggtttagcattagatcttacaaggttaagggttcagtcccacaagactgcctgtactttacttcagatgccagttgcaagtcctggccttctgtacttctgactgactggctataaattgggcttctgatcctctccttaggtttgatgatttgctagaatggctcaagaaatccggaaatgctttactcaggtttactggtttcttatgaagggtacaactcaggaatatctcaatgggagaaatgtataggagaaggtattagggggtggggatgaggtttggaggttccatgccctctctgggcttatagccttcccagcaccttaatgtactcatcctttggaagctcatcaaatctcttgttcaagaggtttttttttttttttttttaattggagatggagtcttgctctgttgcctaggctggagtgcagtggcacgatctcagctcactgtaacctctgcctcccgggttcaagcaattctcctgcctcagcctcccaagtagctgggattacaggtacgcaccaccacgcccagctaagttttgtattcttaatagagatggggtttcaccatgttgaccaggctggtctcgaactcttgaccttgtgatctgcttgccttggcctcccaaagtgctgggattacagatgtgagccactgttgctggcccgagttttttttttttgagatggagtctcattctattgccaggccggagtgcggtggcatgatctcggctcactgcaacctccgcctgccaggttccagcgattctcctgcctcaccctcccgagtagctgggactacaggcgcacactcccatgcccagctaatttttgtatttttactagagatggggtttcaccatgttggccaggatggtcttgatatcttgacctcgtgatctgcctgccttggcctcccaaagtgttgggattacaggcgtgaggcaccgtgctaggccaagagttttttatagaatttaatcaccaggctctccttcctccctcatgccccattcctggaggttagtagatggaactactaacagaaagttccaatcctttaattacttggtctttctgattatcagctccatcctgaggtgatctagagaccccaccctaagtctcctcatcagcataaattgaggtgtgttccaaaggggctctttatgaataacttgaaaatacttttattactcaggaaattctgaggattttggataggggctctgtgctagaaatctgacaaagaccaaatgtattattatactccttagcagaacatgtagggagaatcctgtggtgctatgtcttaaggagaaaagctgtggatatagtagaaatttggatcagagaaggtggagcaaagatttaatatcttttattttattctccagtgctaagccatgtgtaggcagccagtaaatacttgtgggctggatataagtctttttttcctttttttgtttaataggaaaggttgtcaatatagatacaaattcactgagatcctccatgaggcctggctttgaagatataatccgaaggtgtattcagagattttttagtctaaatgatgggcagtcatggtcccagaaacgtcactatcaagaaggtaaagaattttggggttgattgttcttatcattttattctttagagacagggccttgctatcttgcccaggctggactcgaactcctggatttaattgacccttctgcctcagcttctgagtagccaagactgcaggtgcacaccaccatacctggttttgtggttgattcttgatcttgtttgtcattatgtttggtatacacatgactgtagttgctctcttgttggtgaggggtaggaaaatgatgcctgagtgttcttattttaccctgttgatgattttggtgcagatccagtctttccttggatttttagaaatgtacttgaagtatatttcctccctgtcccctcctatatatatttgttttgctgactgtagttaccagtgatgggatattttccccaacagcttatcttaatggccatgcagaaaccccagtatatcgattctcgttggctgatggaactatagtgactgcacagacaaaaagcaaactcttccgaaatcctgtaacaaatgatcgacatggctttgtctcaacccacttccttcagaggtaatgatagattactgtgtattctaatacaaaatgcagcagtgttctcaaaatgctttattattaaagtaaaaagggaagggataaaatgagacaaaatttaggaaggttattgggtttgatgaaatgagtttagattcctggattatgatatgtttaaggttgtatttttatgtgaaagtgattatttattaaatactttacaggaaagctaggtgatgggaaggctaatgggtggataaaagagcacataaaatctgattacatgtcttaccactcatttctgataatgtgtgttgctttggggactgcatttaaaatttgagggtaaacttcaagaataaaggtagttactgtctgggttggtagtggcaaataagaaatgcatgaaggggaggatattcacccattaattatcttgagtaatttgcaggtacccccaggtgaagccctagataatgtggcaactctaataaagcccacctgaaactccagttaacatagctgttggtctttcataatactacagtggtctcactcatagattctgtggcttactgaaaaatatgttactaggtaaataattgatcaatatgtagattggaactgtcactaggtattggaatgctgcctaaaaagttaagttcctgggtagttaattcatcccatttttttattccctctccttctctctcccttcttcctttcttcttcttctcttcttctttttttttttttttttttttaaacagagacagagtcttgatctgtcacccaggcaggtgtgcagtagtgccatcacagctcactgcaacctcgaactcctgggctcaggcgatcctcccaccgcagcctcctgaatagctaggactagagatgtgtgtcactatgcctggccaatttttaaattttttgtagagacatgatcttgctgtgttgcccaggttggtttcaaactcctgagctcaagtgatcctcctgcctcagcttcccaaagtgctgggaatataggtgttagccactgtagctggctggttttttaaaattttattttattttaaatctgattaaaagctttcatgcatgcttagaattttttagtaaaagtttgatgtttgttttgcagagaacagaatggatatagaccaaacccaaatcctgttggacaagggattagaccacctatggctggatgcaacagttcggtaggcggcatgagtatgtcgccaaaccaaggcttacagatgccgagcagcagggcctatggcttggcagaccctagcaccacagggcagatgagtggagctaggtatgggggttccagtaacatagcttcattgacccctgggccaggcatgcaatcaccatcttcctaccagaacaacaactatgggctcaacatgagtagccccccacatgggagtcctggtcttgccccaaaccagcagaatatcatgatttctcctcgtaatcgtgggagtccaaagatagcctcacatcagttttctcctgttgcaggtatttgtgttgacatttccttttattttttttctttttaagtaattattctttccatactactataattcttgtaaagttaatctattttataatagaaactttgaagaattaagttgtattttgttacagtgtctggtagtctaattcttttcctaaattttttttcaaattcaggtgtgcactctcccatggcatcttctggcaatactgggaaccacagcttttccagcagctctctcagtgccctgcaagccatcagtgaaggtgtggggacttcccttttatctactctgtcatcaccaggccccaaattggataactctcccaatatgaatattacccaaccaagtaaagtaagcaatcaggattccaagagtcctctgggcttttattgcgaccaaaatccagtggagagttcaatgtgtcagtcaaatagcagagatcacctcagtgacaaagaaagtaaggagagcagtgttgagggggcagagaatcaaaggggtcctttggaaagcaaaggtcataaaaaattactgcagttacttacctgttcttctgatgaccggggtcattcctccttgaccaactcccccctagattcaagttgtaaagaatcttctgttagtgtcaccagcccctctggagtctcctcctctacatctggaggagtatcctctacatccaatatgcatgggtcactgttacaagagaagcaccggattttgcacaagttgctgcagaatgggaattcaccagctgaggtagccaagattactgcagaagccactgggaaagacaccagcagtataacttcttgtggggacggaaatgttgtcaagcaggagcagctaagtcctaagaagaaggagaataatgcacttcttagatacctgctggacagggatgatcctagtgatgcactctctaaagaactacagccccaagtggaaggagtggataataaaatgagtcagtgcaccagctccaccattcctagctcaagtcaagagaaagaccctaaaattaagacagagacaagtgaagaggtaatttgttttctgtatatttcagctcatatttcatcatttttcggtgttagataatgtgatataaaaattcttccattttaggtttatttaaagaaagttaaatctttagctctcatttctttataattattttggatgtcagtaaaattatgatgtaatttagaaataacagatgtgtatgttttaagatgtgactataactctttagtagccaatatgaaattttttcatggaggtgtttattgctggaatgggcagattgggtcattaagagaatggtagaagtaatcaggaaaaaaaaaacttgtattaagcagcataatttttattttaaggtaaaatcaagtttcatgcacaagatgacattctgtataagcatttcccaaacttataggatatattaatatgcacttgagaaaatgaaaggcttaaagttaggatgtgggcttaacctactgttcaccaaatttattgaccgaagccctttttagagcatgcctatgaacatcccagcttgctccttttattattaatcacacttattttcagaaggtttgtgtagatgcagatatctgttagctaattatcaatgcactgctagtgactgttacctgcaaaatattctacagtttgagaattaaatgtcttgtgtaaatttaaaaaatgcccctttgaaaggaccaaatgtagtgatttaatctcagaggaggaagattagagatgggggtcataataaactggcctttcaggtgggtattatcattgtaggtagtttttgtattttacttgcttctatttcatgtatcattttttctgatgggtatgtttatacctgtgtgtctggtaatgtatacaggttaatttttaaaactttattttcagggatctggagacttggataatctagatgctattcttggtgatctgactagttctgacttttacaataattccatatcctcaaatggtagtcatctggggactaagcaacaggtgtttcaaggaactaattctctgggtaagaatgaactaggttttttttttttttgctgcctttgaaacttttctgcatacctgtaaacactcttacactaagaccaggatataaatagcatttataacttcagaacatatattctgcctctgttttctatactaatttatatgtgctttagaaagctttttgaacattttcctgttttttaaaaattaaataaatttcccacttctaactaatatgccagtaatcatggcacttatagaaaaatattcatgtttgattattccaggtgagtactgtaggtactagggcatatatttttcttagccacagagaactggattaaaaagcaactcagactctagattaaaacctgtccattggtgttttaacagaatcttgtcatttaattaagatagttttctttggtgtttgctggttcttatctagcccctctcctgttgctgtgtgttgacttcatcaatttaacaaaggtaggccgggcatggtggctcacacctgtggtcccagctactcgggaggctaaggcatgagaatcgcttgaacctgggaggcgaaggttgcagtgagccaagattgcgccactgcactccagcctgggtgacagagtgagactccgtctcaaacaaacagacagaaaaacaaagatatattgtgtgtgtcaattgaaaaggcagcatgcacaattattcagaatggtcattattcagtagcattatttcctaaactagaatggatagatcaattaagagtgggggggaaaaaaagaaggttagaaggggattttacattttatttcttttcgatcagaaggcaacttatctggttaagttgattgttaaaattataaacagtatacttaagtacaaatatgcaagaaccttcaggagcttggaacatttgtgaatttttcaatattaagtgaagcgcagagtatcagtgaccatatcaggctacagaaaagttctcagtacttcagccgacatggagattgttgtttctactttatttggaatatgagacccttttttggctggcaggggggcggggggtggcggtggtgggtgagggccacttccctcacttattttgtaaaggaagacagtgtttgtttttgtaagaaagacattcttgggtggggagtggtggtatttgtgttttgtacttgattatttatatattaaatcacgaagaaatgtttttgtattgtgttttcaacaggtttgaaaagttcacagtctgtgcagtctattcgtcctccatataaccgagcagtgtctctggatagccctgtttctgttggctcaagtcctccagtaaaaaatatcagtgctttccccatgttaccaaagcaacccatgttgggtgggaatccaagaatgatggatagtcaggaaaattatggctcaagtatgggtacgttatttctaattagtatgtatgattattttgggaaaagcatatttaaaatacttaaagccatctaaataattgggagtaaataataactttttgaataacgttagtatgtttcttccatgaatatccttcatttattctatgttttggttatgtaaactcttcaagagtcttttggtctatgacattttccagcctgttgaatatatgagaatagtggcctatgtctccacagttggccagcccttttcttaccatgacaaagtgctgttttgtcaaggttgatgttgtgtataatggctgtacttacatggtataagaaggatttcattataatatggaaaagacctaagtatggctacctgttttaggtgggccaaaccgaaatgtgactgtgactcagactccttcctcaggagactggggcttaccaaactcaaaggccggcagaatggaacctatgaattcaaactccatgggaagaccaggaggagattataatacttctttacccagacctgcactgggtggctctattcccacattgcctcttcggtctaatagcataccaggtgcgagaccagtattgcaacagcagcagcagatgcttcaaatgagtaagtgtccaccctcccctcttcatgaaaaaagaaagttagatgtttcaggataatttttgctcttatttgagaatttgtgctttctttttgctcccccagggcctggtgaaatccccatgggaatgggggctaatccctatggccaagcagcagcatctaaccaactgggttcctggcccgatggcatgttgtccatggaacaagtttctcatggcactcaaaataggtggggtgttattttgtgactctgtagaaaatctcagcattgggtagtttagaaaagagttggagcacagaagcaaacgtgaaagagaatgagaattccctataattgaggtactgggttgccagctgggcatttctcgtgtaactctgtgtaaaaatgaggctgaagcagtaagcagtgcgtgtggcattcacaggagagggaggagatacaaccatgttgtccagccattagggccattcagtggccaaacctctgagagcctctctgtgagatgattgtctctctagtcccatgaggaggggaaaaaagataagtacatgtttctagtggttttataaatgttcttcagagggttagcctcagttttccagaaaattaaacttttttaaaaaaacttttcttttcccccaaccacctgctgcctattgagaaaattcttttaaggattggctaattgttttctaaaattattttaaacatttcagtgatgatagtgaaataactatatagcatctttaaaatttttcataaaataaagattgtaggcccggtgtggtggctcacgcctgtaatcccagcactttgggaggccgaggcgggcagatcacaaggtcaggagatcgagactatcctggctaacaaggtgaaacccctgtctctactaaaaaaaaaaaaaaaaaaaaattagccgggtgtggtggtgtgtgcctgtagtcccagctactcaggaggctgaggaaggagaatggcgtgaacccgggtggcggagcttgcagtgagctgagattatgccactgcaccccagcctgggcaacagagtgagactccgtctctaaaaaaaaaaaaaattgtagattgtatttaatttttatttagcttagtaatttacttgcatgcaagaggccatggtcaatgtcagctctaacaggaattctacagtaagttaagcaaggaaaataaaaatgaactgatctattgagcagacagtgatgtaactatatgaatttatttgagtgcttctctactctatatgaatttatttgaatgcttctctactcaatagagagcaaatagtttcaagttaacagaacttttctgaggcaggataaatgtttaacttcatgcccttgtatgtgttggagaactgaggcaacttgctgtgggtgtatggggtttgtgttacacttgccaatatgagctctgtgggccaagtgtgacaaagtcattttggtatttctccagactcacgtcagtgatagctcaacatttctttttttttttttttttttttgagacggaatctggctctgtcgcccaggctggagtgcagtggtgcaatctcggctcaaggatctcctgggctcaagcaatctgcccacctctacctcccaaagttctgggattacaggtgtcagccaccacgcctggctcccttcttttttttttttttttttttttttttttgagacaaagtcttgctctctctcccagcctggagtgcagtggcgcaatctcggatcactgcaagctccgcctcctgggttcatgccattcccgcctcagcctcccgactagctggggctacaggcgctcaccaccacgcctggctgattttttgtatttttagtagagacggggtttcaccattcacaggatggtctcgatctcctgacctcgtgatccgcccgcctcggcctcccaaagtgctgggattacaggcttgagccactgcgcctggccatagctcaacatttgtatccttccttttattcttttgatttctctaattttcaagtattataattattacctccttcactgtttttgtgaggagtatcttctcccatccttccctaccctccccctggcccccatttctgctataccccaaatgcctagggtttggcaattacaatttggtgttgggattgggggtttaagctgtatatggtggtctaaagtggcctggtgaaatttctaaattgtgggccttaaacttaaattgatgccattcactcttttttaccacttggtttattatttgtgtttgtagcatttgagttactgttcattaaaaatactatgcatggttgctgtgatctattactcttagaaaaaaaaaaagcaccattgacattgattgcaagtctttttctaggcctcttcttaggaattccctggatgatcttgttgggccaccttccaacctggaaggccagagtgacgaaagagcattattggaccagctgcacactcttctcagcaacacagatgccacaggcctggaagaaattgacagagctttgggcattcctgaacttgtcaatcaggtaggttgcattaacatggaagtaggagagtgtatatttgtgtgtgtgcgcgcgtacacattcatgaagccacatacaagaatgcctgtgtgtgtctctcctagtacttgtgttatatcactacattcatggataccagcattaaatttggaaaatatccttttttggtctcaattcgtatgttaaaatagaaaatatacttacgattgcgatattactttcaacaacccactatttttggcaattgtagaaatgatttagttaagctactgtactgttcttaaaaatgtgaccttttattcatgttaacagttctcatttttataactatctttctctactacttagccaagccgtgtgtattctgaggcaagctttttttttgcttgtttgtttaaacaaaacttgtttacaatggccaagctgaacatcctaacatcatggtgtcctgttcctgtttacataccccgccttatgaaaacatgccattcacaaatctgtatttctgaaagacacattctgtagtgactgttttttcttttttgaatcggagtctcgctctgtcaaccaggctggagtgcagtggcacaatttcatctcactgcaacctccacctccagggttcaagtgattctcctgccttagcctcgcgagtagctgtgattacaggcacccgccaccacgcccgggtaatttcttttgtatttttagtagagatgagattttgccatgttggccaggctggtctcaaacttctgacctcaagtgatccactcgccttggcctcccaaagtgctgggattacaggcgtgagccaccgtgcccagccatgactgtttttatttaaaggctatggaggggccactgtataggtttgtgcgttcaacagtaagcaggaaagatcatcaggggctgtcagttgttgttggggaaatagatgtgtacatatggaagtacactgccatgtggcaaatgctgtcacagtgcagatgggaaacgctgagcagtccttgtgtacaccttcagggataccagtgacatagaaccttggcactgaggagccatattttatactccaacagaagtatagaagttcttttttatttctttacttgttcaggcacactaaataacccatcaattccttccttccctcctgtagttctctctgttttactgtgtccttgtgaggcaagtctagaaattaataattgtcactattcccctgtgttggactcctagtatcctgaatctcaaatcgctttctgtcttgatttactcctttgttttgctgcaacacaacttctattaacttcttcatccctactgcatgaaataaaatgttttgggttctatgtgtctgaaaatatctttattccaccctcctacatgtctggctatgtattacattctaggtttaaaataattatatacttttgaaagatttctgccatagttttctggcatctagtgtggccactgagttgtatttctttctgattttgattcatttgcatgtgacccgtttattctctttggaatgatttaggaactttttctctccgaaattttatgatgctgtatcttggtatgggtcttttttcattcattctgctgtgtactagatacactgatattccctttggtttaggggtgttttcttgtataatttctttattaaccttatctctcctgtgtttttttttctgacctacttttctgggatttctgttgacatgttgggcattaaattcgttctatttttttttttttgagacggagtctcgctctgtcgcccaggctggagtgcagtggcgtgatcttggctcactgcaagctccacctcctgggttcaagccattctcctgcctcagcctcccgagtagctgggactacaggtgcccgccaccacacctggctaattttttgtatttttagtagagacggggtttcaccgtgttagcgaggatggtctcgatcccctgacctcatgatccacccacctcagcctcccaaagtgggattacaggctgggattacaggcgtgagccaccgcgcctggcccttcattctatattttgaagtcttctctatttttcttgtctttgatttgcttgagtcacgttcaagcttggaaagtgttggacgcttttatcaagtatctggtgatccctgactgttcttatatgttaagagtgagacattaagaagctgatttgacactttgcaagtgtgagcagcatcagttgtctttactgagggtaattaagtggggaactagccctagcccttttatttcaggactccccaaatttttatttatttatttttgagacggagtctctccctatcgcccaggctggagtgcagaagcgtgatctcggctcactgcaacctccacctcctgtgttcaagcgattctcctgcctcaacctcctgagtagctgggactacaggcgcacgccaccacgcccggcttttttttgtatttttagtaaagacggggtttcaccatattggccaggctggtctcgaactcctgacctcgtgatccacctgcctcggcctcccaaagtgctgagattacaggtgtgagccaccgcgcctggccaggactccccaaatttccacatgtagagttgttttcaaccaccactaccactcctgccatctggtaatcttttattacctggttgcattttgggagctgggctagggaggcaagtgtgggatattaaattataaaatataaaattttatttaaattataaatatgctaaatataaaatttcctgttttcagcctctgcctcactcctttcttaggctctgcttggtgcccctgaacccctgtacctttgtcgggtaggtagaaggtacaggcctttcgggagtcagggagcaggcagggaggtagttgacctcctgctctatactcagactcctaaccaacctcctcatttcagcaccatgctctgatcccctaccaccctcactggagtctcaatagatctgtggaatacatttgcttgtttttcatatgtatttttcctctgtgggcacataagtctaagtttttctgttctgttgagctggttcctacttctctattcactttgtatcttctattataaatatggaaatacttgatcttgttgcgttattagtgttttatggataaatactaccttttaagtattttttttttaaataaactggatacctcttagttccctttattgtcattttagtagggttagcaagtgaatgcaggtaagcatgcatgatcagtctgccatgtttaacttaaagtatagtttgctttattaagacatcttcagccaggcatgatggtgtgtgcctgtagtcccagctactggggaggctgaggtgggaggatcacatgaacccaagttgatgggacaaaatagaaacatagtttccagttactatggtaacagtccaagaggtgtcctgggaagggtcataagggtgaaatggaaagaagggagggatacatgatatgccctggaggaaaaattgacaggacttggtggtcacacgtgtttactcttggaaagggagaatgtgaagaatcaaattgctgggttttggttcctgggcagtgaatggtgatgctgtgtaccgtcaccatttgacatctgtgaggggttggtttcaggacccctgtggataccaaaatccatggatgctcaagtcccttatataaaacagtctagtatttgcatatagcctatgcacatcctcccacatagtttaaatcagctctacattacttataatacctaatacaatgtaaatgttatgtatattatatagttgttacactgtattgtttagggaattattataagaagaatgatgactgtgtgtattcagtcaggtacagctaccgtttccttcccctggaatgttttcagtcccctgttggttgaatccatgagtgtggaaccatggatatggagggccaactgtattgtgatatagtagggtaggttggaggagaacaagcctgcttggggggaagggctgttgggaatcatggtgtctgttttctgcctgttaagtttgagatacctgagacatcagggtgcggatgttaagtaggcatttccataaacaaaaccaaaagttcagagatgttttggctggagacaaaaatgtgatcattatcaccagcggatgagagcacctaagtagaaaatatatcaagagaaaataagagagcctaggactgaaccctgatgaacagttagcattcattcaaggaaaggccagagagatgggagaaaaatgagaagtgttgcgaagtacagtggggtgaagtatgcttcaagagagacatgtcaagcatgctggctgcatgcttggcattcagtgcctgtggatgagaaaataaaggtgaatgcacagtacacctggttcttgtcttagcacagcaggttgttctcttcttcagaatatcaacttttacttctttttctgtcacctgtgggatgttattttgaatgtatccttagcatgtagagaagtgatgcctggcacataacaagcatttacttaaatacttgttgaatgactggatgttttttgcactttctttagagcatttgacttctgttgctttcatagatgttcttcactgttcttttatgtgttgtgtttaagggacaggcattagagcccaaacaggatgctttccaaggccaagaagcagcagtaatgatggatcagaaggcaggattatatggacagacatacccagcacaggggcctccaatgcaaggaggctttcatcttcagggacaatcaccatcttttaactctatgatgaatcagatgaaccagcaaggcaattttcctctccaaggaatgcacccacgagccaacatcatgagaccccggacaaacacccccaagcaacttagaatgcagcttcagcagaggctgcagggccagcaggtaaccagtcatgtgttcttccctctggcttctccttctgttgttttcagactatgtttctcagtgttcttaccactggtgcaatctatccctgtcaactaaagaaattctttttgttttacttctgtgtaaggttttatttgtacaaatggctccttgttaaggagtagttttatgagaatattctattttacaggtaaaaagtaaaaaaatgtcaggaaggattgctcttggggaagaaaaatgttacttgatgactttgtagtcttaaaggtagataaggttttttttgaaaaaaatccttactgctaataaccaaatacttaaaccttcttgatttcagcatttttaatggaactcttctttctagatgttttataaaactagagttgtcttttaatattctaaaatatgacttctgtttaccctattgttttcttagtccccaagaaatgttttaaaattcaattgtttttattgtttatgtcttcaaaccatataagtagatgaatgcctgaggttttttttttgtttgtttgtttgttttgttttgtttttttttttttgaggtggagtcttgctctgtcgcccaggctggagtgcagtggcatgatcttggcttactgcaacctccaccttctgggttcaggtgattctcatgcctcagcctcccgagtagctggggagccacgcaagcccggctagtttttgtatttttagtagagacagggtttcaccatgttggccaggcccgtcttgaactcctgacctcaggtgatcctcctgccttgaccttccaaagtgctgggattacaggtgtgagccaccgtgtgcggccaaatgcctgagtttggaatccaaagagccagagactccattgcataaatattgttaaaagtcagtttaggtactcagaaaagctgtgttactgtattcattttactttctgccgtttcttcactaaaagtcatttagggaaagctaatggagtttattcagaattcctctgatcaacttaaaggtatttccccatgtgcccgaataatcccagagaaagcctgactataaatcttttgagtttctattgtgtgtgtgtatatatatataaaatttatttatttattattattttttctgatacagggtttcaggatggaatgcagtggtgcagtcacagcccactgcagcctcgacctcccaggctcaggtgatcattccacctcagcctcccaggtagctgggactacaggagtgtgccaccactcttggctaattttttgtagagatggggtttcttcatgttgcccagactgatctcagactcttgggctcaagtgatctgcccacctcagcctctcaaagtgctgggattacaggtgtgaagatattctttaagctgcaaaattgcactttacttttttttccccagtgccaaacagtagcccatcatatgctagccaaagacttttcaacattgacctttttgcagtgtgaaagtactggttcagtttagacgtgacttagccaggttattgtgtttggagatattacctcattggctggtgctgagggtctggaaagctgttttggcagactgacgtgctctgcttgcattctaaccaacttgtctcacctcagtttttgaatcagagccgacaggcacttgaattgaaaatggaaaaccctactgctggtggtgctgcggtgatgaggcctatgatgcagccccaggtgagctcccaggtgaggatgataagcctctccacatgcattgctctgtgctcaggacagggcttggcctgtggttggctctcagtaaatgtttgttaaacaaatgaaggtaattctgaatttcttgtgtaagaaagcagtcgcattaaagactttcgactcttccattcttctctctggctggtgactgggaggaatcagaggagggagagctttcttcattaaaaccatcgattagtgtttttttaattggttccctttgtgatcagttgctgtactgtgagaacagctatcacttggctgtttaggaatttaataaatctgtaaatgttcctctgttcctggattatgaaacaacatgcacactgggtaaaattctgaaattataaagaagaaaataaagaatacataatcctgttctcagtgatagcctctgagatgacctgtttcttgtagtaggaggggatattaaaattcccttctacttccagccagtggtggagacagtattgaggggtttttttaatgtgcatgaggcagatgaccacacagcaatcctctattgtgatttgaaatatcgtttataattgttttttaaaaagcaactgtgaaatgctcgatttttattgtcttatgcctacttggaagtactgatatttacattttcttgataataaaacatcttgtggaagctgagctagaatgtcctacagaaagatgataaaagcttgctttttggagatgacccgtagctagtagagctgaaatcagcttccttgttgtacttcagttatgtcaccttctgaacctccagatagcttctgcttgccccttacctctttctgaaagtttaaagaaagttcaagattttctgaggtggacccctgcttatctgagtataaccccatcttattttttttggcttcatgtttcagccctccaccaccccaacacactgaatcctcattttcctgtaattgtctttcatagttcctgaaaaatttgtcctcagattccacccctaaatgttttcttactttgtggaatgtttctagtcatgttaaagcttgacagtgtgttgtcttttgtcttttaaccccaaataattttcaggtccctcttcttcagttctccctccctccccttgcaatagccagaaagctttttttttttttttttgagagtcactgttgcccaggctggagtacagtggcacgatctcggctcactgcagcgtcaattccctgggtttaagggattttcctgcctcagcctcctgagtagctgggattacaggtgctcatcaccaaggctggctagttttggtatttttagtagagacagggtttcaccattttggccaggctggtctcgaactcctgacctcaagtgatccgcccaccttggcctcccaaagtgctgggattacaggcgtaagccactgcaccaggtcagaaagcttttatgtgaagaattgtatgttttggccggcacagtggctcacacctgtaatttaagcacttcgggaggccgaggtgggcggatcacctgaggttaggagtttgagaccagcctggctaacatggtgaagcactatctctactaaaaatacaaaaattagccagagtggtggtgcacgcctgtaatcccagctacttgggaggctgaggcagaagactcacttgaacctgggagacgaaggttgctgtgaggcgagattgtgccactgcgctccagcctgggcgacagagtgagaccctgttaaaaaaaagaaggccctgggtgttttctgtcttatacctggtgtattgtgggggtactatatgtatgcaactggcaggttcttgctatatatatgtaattgcactctttcttgggtattagcagggttttcttaatgctcaaatggtcgcccaacgcagcagagagctgctaagtcatcacttccgacaacagagggtggctatgatgatgcagcagcagcagcagcagcaacagcagcagcagcagcagcagcagcagcaacagcaacagcaacagcaacagcagcaacagcagcaaacccaggccttcagcccacctcctaatgtgactgcttcccccagcatggatgggcttttggcaggacccacaatgccacaagctcctccgcaacagtttccatatcaaccaaattatggtaaatctgacaatgaaaatgtgccttccccaagttaacattactaaggacataagcttcattacatttattgcacatgaaagacaaaaacacgattcactccctctttacttcacaaggaaaaccaaattaatttaaatgattggaaaacaaaaatgctgcagcacacaggtaattgagacaggtgtatcctgtcatagttgaatatttttttcagtcccactcattaagagtccccaaactctggaagaaacactgcaaagttgtccccttgccccttcttgtatgttccagtatagtagaactctctaatctctgaatgcttggtcaagtcagtgagaggaatgcactttgtgggcttttaagttgattttcttggtgacttggatttattattttttttttgagatgggggtcttgctctgtcacccaggttggagtgcagtggtgcgatcttggctcactgcaacctctgcctcccgggttcaagtgattctcctgcctcagccctgagtagctgggactacaggtgcattccaccacccccggctgtttttttttttaaatttttaatagagacggggtttcactgtgttagccaggatggtctcgatctcctgacctcgtgatctgcctgcatcggcctcccaaagtgctgggattacaggcgtgagtcaccgtgcccggccctggatttattattacagtgatgcagatacctcttcatttcagcctttgagaggttccaggaacatggtgggaataaaggtgtctattggggagccctgtcatctgaggattataactcccctgccctttaaagaaggatggagtgatgtgagttgagtgatacggagtcccttttctacaggaaacccattaaagcaactgatctttcagtgatccagatggtgctcctttctgtagtaagcctgttactctagtcgtcatcttggtgagaatctagaatacctgggggggcagcatcttatagcactctgtatcttacacttatcacttccctccacccccacctcctttaaaaaaaaaacaaaattactacagaaatctgatattctaaggagaaggcatttgggcatttttatttcttctgttttatttttgtaaggaatgggacaacaaccagatccagcctttggtcgagtgtctagtcctcccaatgcaatgatgtcgtcaagaatgggtccctcccagaatcccatgatgcaacacccgcaggctgcatccatctatcagtcctcagaaatgaagggctggccatcaggaaatttggccaggaacaggtaaagaacagtgacttataaagttagtcacatcctagtcccagaagtccaagaacttaatgtatttttcagtcaagcctttttggatggagaggttgaaaggactgggttcatattagaaggtgtgatttggcttgtccattttgagagtccttcaagcacgcacatatctattagggtgtctagtacagaaagctgtgaaaaatggatcacaggctgtcagggagttttctctaacattcccagcttaagtatagcaatgtttgacacaattgtagtaatttctgtgggcatgccctttgtcgctaaagtgacttccagaggtaatattaccatttgtttacttacagctccttttcccagcagcagtttgcccaccaggggaatcctgcagtgtatagtatggtgcacatgaatggcagcagtggtcacatgggacagatgaacatgaaccccatgcccatgtctggcatgcctatgggtcctgatcaggtatgggatcgattccttacctttttcaaaaagtttttcttgttctctggatagaactaaagcctaggctataatcagaatgtcctaggtatattttaacttgaatgtataacttaaaatatagtaattgaaaaaacttggtttgaaggcattgggccattagatacttttggtaagccagagctgcattgtaagatgggatctcaggaacctgaatcactcagccagagctgcactgtaagccatgaatgtggacatgggtatttttttgttgtgcaaagcatgtgttttactcattttttttttttttttttttttcctggttgctgacagaaatactgctgacatctctgcaccaggacctcttaaggaaaccactgtacaaatgacactgcactaggattattgggaaggaatcattgttccaggcatccatcttggaagaaaggaccagctttgagctccatcaagggtattttaagtgatgtcatttgagcaggactggattttaagccgaagggcaatatctacgtgtttttcccccctccttctgctgtgtatcatggtgttcaaaacagaaatgttttttggcattccacctcctagggatataattctggagacatggagtgttactgatcataaaacttttgtgtcacttttttctgccttgctagccaaaatctcttaaatacacgtaggtgggccagagaacattggaagaatcaagagagattagaatatctggtttctctagttgcagtattggacaaagagcatagtcccagccttcaggtgtagtagttctgtgttgaccctttgtccagtggaattggtgattctgaattgtcctttactaatggtgttgagttgctctgtccctattatttgccctaggctttctcctaatgaaggttttcatttgccattcatgtcctgtaatacttcacctccaggaactgtcatggatgtccaaatggctttgcagaaaggaaatgagatgacagtatttaatcgcagcagtagcaaacttttcacatgctaatgtgcagctgagtgcactttatttaaaaagaatggataaatgcaatattcttgaggtcttgagggaatagtgaaacacattcctggtttttgcctacacttacgtgttagacaagaactatgatttttttttttaaagtactggtgtcaccctttgcctatatggtagagcaataatgctttttaaaaataaacttctgaaaacccaaggccaggtactgcattctgaatcagaatctcgcagtgtttctgtgaatagatttttttgtaaatatgacctttaagatattgtattatgtaaaatatgtatatacctttttttgtaggtcacaacaactcatttttacagagtttgtgaagctaaatatttaacattgttgatttcagtaagctgtgtggtgaggctaccagtggaagagacatcccttgacttttgtggcctgggggaggggtagtgctccacagcttttccttccccaccccccagccttagatgcctcgctcttttcaatctcttaatctaaatgctttttaaagagattatttgtttagatgtaggcattttaattttttaaaaattcctctaccagaactaagcactttgttaatttggggggaaagaatagatatggggaaataaacttaaaaaaaaatcaggaatttaaaaaaacgagcaatttgaagagaatcttttggattttaagcagtccgaaataatagcaattcatgggctgtgtgtgtgtgtgtatgtgtgtgtgtgtgtgtgtatgtttaattatgttaccttttcatcccctttaggagcgttttcagattttggttgctaagacctgaatcccatattgagatctcgagtagaatccttggtgtggtttctggtgtctgctcagctgtcccctcattctactaatgtgatgctttcattatgtccctgtggattagaatagtgtcagttatttcttaagtaactcagtacccagaacagccagttttactgtgattcagagccacagtctaactgagcaccttttaaacccctccctcttctgccccctaccacttttctgctgttgcctctctttgacacctgttttagtcagttgggaggaagggaaaaatcaagtttaattccctttatctgggttaattcatttggttcaaatagttgacggaattgggtttctgaatgtctgtgaatttcagaggtctctgctagccttggtatcattttctagcaataactgagagccagttaattttaagaatttcacacatttagccaatctttctagatgtctctgaaggtaagatcatttaatatctttgatatgcttacgagtaagtgaatcctgattatttccagacccaccaccagagtggatcttattttcaaagcagtatagacaattatgagtttgccctctttcccctaccaagttcaaaatatatctaagaaagattgtaaatccgaaaacttccattgtagtggcctgtgcttttcagatagtatactctcctgtttggagacagaggaagaaccaggtcagtctgtctctttttcagctcaattgtatctgacccttctttaagttatgtgtgtggggagaaatagaatggtgctcttatctttcttgactttaaaaaaattattaaaaacaaaaaaaaaataaatttttttgcaatcctttcctcagacctggctccaggctaactggaaggcagcactcccttttttatatagtagaaaaatgaagtttattataagtttttatattttctacttgttcatttggtgcaaactcaagatttcttttaataggtgcagtctttgagataatttgtttttacctgtattgccctttatcttttttaggtaattctttgtactcctgctgtctacctctcctcacaccccagcaccccccattttttcaaaccttggtatctgttgggtgaacagtataatcttttcatctgcttttagaatgtgggatatttccagtacctactttttttttttttttttgctgaatccaaagatatataaataaaatatatatattttataaagatcagaatgatataaaggagatacatgtttcttcctttaaaaaataaacggaagttacattgttaatgttcatattatgatgccacttttctaaactgcatctggattgaaaggtgtaaatatcaataacagtgctacttagttatcagtatttaatatctgaggtgagttgggggtatctatattaggggtagggtattacagaagataattggcttgatgtcctagaagttctttgatccagaggtgggtgcagctgaaagtaaacagaatggattgccagttacatgtatgcctgcccagttccctttttatttgcagaagctgtgagttttgttcacaattaggttcctaggagcaaaacctcaaggattgatttattgttttcaactccaaggcacactgttaataaacgagcagggtgttttctctcttcctttctaatatatggagtttcgaagaataaaatatgagagcaatatttaaattctcaggaattgacttatactcttgagaatgaattcagtttcaatcaagtttacattatgttgcttaaaaaaatagaaattattctttatcttgcaaagaattgaaaccacatgaaatgacttatgggggatggtgagctgtgactgctttgctgaccattttggatgtcattgtaaataaaggtttctatttaaaattggagcctaaagagttttttttttttttttttttttttaaatccctgttgggttaagggtaaaggaggttaaggaagcctatttcaaataatggtaacagtttctgagaagttaaaaaacgccactagggagttgctagggagccttggcctgtttggggcattgaaacaaatgtgggtgcttttagggattatctccgtcatctgttaaatgagaaatgggttggactggtgattgatagttgaaatctgtcaactacttgtatcaggttagactacctgatacacaaagaagggttggccaaggcgaatttctttgcaattgattaatacttttttaaaaaatgaagtaccaaagctggtatactatgagacttacctgtagtcccttgaagtatggtagactttttagtcaatctacaaccatctactccccttttaagaaaatcttctaaacccaaggcattttcttccaaaaagatgttgactggtagtatcttgaatactttaaaaaaacagacacaccaaaaaactcccaagaaatggccttttacaaaatgtcaaaggttcttcataccaactgctggtcattggctggggttttgaacactgtatgacaatacttaaactacaaaattttttttacaaatacagtttcatcaaaacttgggacatacatcaacttcatttcttttcagtaccttaaaaaaaaaacatcagttctgggacataacaaagaaatactaggagaaatggtatctggacaggaacagaaatgtccacaactgcgagggattttcttttacactggccacagagcgtttattgacaccaccactcctgaaaattgggatttcttattaggttcccctaaaagttcccatgttgattacatgtaaatagtcacatatatacaatgaaggcagtttcttcagaggcaaccagggtttatagtgctaggtaaatgtcatctcttttgtgctactgactcattgtcaaacgtctctgcactgttttcagcctctccacgttgcctctgtcctgcttcttagttccttctttgtgacaaaccaaaagaataagaggatttagaacaggactgcttttcccctatgatttaaaaattccaatgactttcgcccttgggagaaatttccaaggaaatctctctcgctcgctctctccgttttcctttgtgagcttctgggggagggttagtggtgactttttgatacgaaaaaatgcattttgtgcagctggtgaggtataatccaaagcaaaagcaggggcaaaaatggacttcctgaagttatctctgctcctgctggttatcctccagaatctgtcatgttgactgagagtgcgtgcttgctttctcaggcctcctggccaataccacaggtctgctggaaatcacccacatggtttttcattgcctgtgcagtcaggtgatgcctctatgtttttggaggtccacctctgttgtttcttaaccttcccagccttcccacagttgtcccctaaagaacaaaacaaactcatcttagcacttagctatcatggtctttatcatgacttcctaatcggtcctatagctgaggaagctttgcttcaaggctgctgagaatgaatatttctaggttacttagaacgggattgccaccacctagtcacctcaattttttgtttacttatacacccaatgcctggcaaggatggcatttaaggatctggacagaatagtggctaaggagattgtgatatgtaaagattctgtaccttaattctagaagcaccgaagaaaggcttaggtgacctgttactaatgtcctattaaagccacacaggtttatatgcatataaaggaagaaatgagtagaccagaggttgcaagtggcagttcaccaagggcgataatttgcccacatggttaacttaatgtcaaattagatgataatgataaagaattctcacacatacttgcatttttggatttggtagacgaatgagaaaatctggcgaacctcagcccattcctgcagggagcaaactggcctgctccctttagaatagaggtgaactttacaggttgccagtctcttagtccctgtcagcctccaatggcactggagtgagagtttgtagcatgggctttttggaaaccatttaatgaggccatcctactactgatgttgtatatcagttagcacttttgtagccacagccttcaagatgcctagcaatttgtaatatttaaatgcttctcaacctctaagtaatagctcaagtttaccaagcacagattatagcgagaacagcagtgtactggacaaggcattaatctaaaacatgaaatggattcaagtgttttcttagggaaagatgtgcattagtacttcccccccaccctcatcatgagaacaaacaaagggtggtatgtaagaaatggcatgcaaatagaatagcattggcaaaatgaagcggtcagaaccagatttctatttgtaagctggttcctcaactcacagtgatttggaagaaggtctcttcatttctggccactttcgacgctgaaactgcctaagttttcaagtgtcaaaggagaatgaatgttaaccatcaccaagaaagaaaaagtccccaaagaactatacaaagaaggtctcctaggtgacacctatctttggtgggtgatcctggtctcgggcagaccagagggaagggcagtttctcaagataacaggtgcagactcacagagatgagactgaaggatgggccaagataggagaactttgtttaggctttaataataaaacgaaatacctgtattgctcatagcttcctccatctttaagtcctaaatgaaggagaaatgaaaaacaaaacaggagcagatagtttaggcaaaacaaccccaacacaccagaaaaccatcttatgcttttttgtcacaatcccatgatgctgatagtgttccctactcagagtagactgaattatgaggggtagactgaattatgaggggaacctgccctaagtctcctagatagccttgtagattgcctaaaatccagtgtcaccatgatcagtttcaggaccctgatggcttcattcagcgctgaccttagttatggtgagggaggtagatgcaggcatgaacatctgtgctccagaggacagaaagccaagagccctgaccaagtgcaggagggagttcccctttgggctctggggaagttttcccgaggatgtggcaggatcaagtgcgtgggctccggggtcagcccaccttgttcaccttactcctccataaaatgaggataagattcacctcaaagcttatcagctaacacatgtaaaatgctcagcacagagcctggcacacagtgactaatatgtcattgcactttgatcacaagagtagcagcacttgagtggcagagattaggaagctactagtgaaaattctgatcatatcaggctcctgaccagaagtattagtgcaacatcttgtgtaaacacattagctcttccctcttcataactagagccgacggtagcgtctgaattcctcctaagctgtgtagccattttcctgacatgaactctaggcatcctcctagacacagtcccttccccaagggaccttaaataccaaaggttttttttaggccactctctctcactagtaagtgaacttcatttttcttttagctttgttttctttttttaatatattttttttatttttagagatggggcgacagctctgtctcccaggctggagtgcagtggtgctatcatagctcactgtaaccttgaactcctgggctcaagtctcctcccacctcagccttccaaagccctggaatcataggcatgagcaaccatgcctgtttagcttttttcatcttaaaatatctatctggttggcattctaaacttaaaactgcagattttgtcctgtcccaaacaaaactcaggatttacctgggactcctaatcccgcacctcccatcaccatgttgtctgggggcttcaccacctgaatctgaaatccatcatctttactgctcccacctctagtccaagccaccaccatttctccctggataactgggccatcttcgctgttttctcccataaagtcccattctccacctagcaaatgtcggtgcccaggttaaaaccctccattggcttcctgatacaccacaaatgaaatctaaactctaccgtggcctaggaagccccacacagggtggcccgatgccctcccgccactctccactggcctcagttgtgttggctgcaccccctgagctgctttctgctcctcacactttaagcttcctggagcgccagccctccacgttttctcagtggtcgattgcatcctacttttcaggactcagttcagaggtctgaccctggttttatttagcagtgcccttccccagtcacactggattctaccatccagttttaccctttccatacaagcaagaggcctcctgctgtggactgctcttcttaggacaacactggctccacacaagtcagcgaggatggggtcatctttagtcaacatggtttcaggtgtaagttctcaggaagtgtttgttgaatgcatgagtggacaaaagggaggacaatgaaatgagacggaattccgtgtgtttcctgggcagttggtgcaggtgttcctctctcaggaatcacagcttgttaaaggtcatctgcctgctatggacaggggctcccatgactcgtctggaactgtatcacctcccaaagcctggtgatttcaggctcattcttggggtagacaccacctcctgagtcccttcctttggttaccctgctgtccaagggccccacgttggggtgcctactcacccaggtccatgtttcgagtccgggggttacactgcttgtaacccttgcagctcctcagctccatgagctgtacgtgtagctggttgaggacatccctgtccagtgtgttcactgcattcatcagctggttgcaaaaaaggtagtctgtcaacaaggtaagtacagggactctcgccctgcccttctaccaaccaggggacatatttcaggcaggtggcgggtggaaggtgctaggggctggtgacctgtttactccaacttctgcaagagccagcgtttggaagagttaggtgactttttggcttcaagtcccaccaggttcactcttcatgagagtgaaaactcaggagaataaaaaccacgtctgtgtatttaacgttggagttctgcagccactggtcaggaaacttcccaagcttggaaagaaagccttccaagtcttggttttatcagcagccttcattcaggggccctcagctcctcctgattgcaaagcagccatttgatgaaaggacgggtaagtggcctgggttcttgtgtagtctgggagctaccggtgagggacttaacctacccctttggtaaagtatgagggtgaacctatctaaggagaaagactgcacacctatatagtaattaaagcatttgtgctgctgacatttaaacatcagatttcatttaaattatttcaggcttttcttgaaaggtcaaagcctgggcaataccaaggccacagtacaggaaagctctagtgctggagctcagtagtgactgtccctgtacaagggcccacatgttccgatgaccagacatgccactgctccttttggtcttgtgtggtcctgggccacttcagtcgcatgtgtgtttagatggcttactgtacggaagcacttagcagagtgcttggtgcagtgtgttactgttatattagctgcgcggtccgtgtaggccctgcagtgggtgatatttggcttgatcctacagcctgacagtgttaggagtcttcacaagttccggcaaaacctggttgcatgctgcatgttaagttagagggaagaagccatatatattacacacgcagggtgatggaggcaaaaagcagggtgatggaggcaaaaaaggctgattgaacacagaacccccaatctcagcagcttcacaacttactcccaccggctcagggactcagtgggacttggacaatttgtcatcacttccctgaggttggggggggcctacctggcagcactggtgtaccccacacccccatccctctagctcgggttgcctgtacctggtaggggtctgtgttgagatcaaagtactctaggaagccagttgcaaattcacagaagaggaaattgtgagtctcattgatggtcctcatgcaccagtacgtgttattgttggcgctggtgcaggcacagaaaggccccactgccaaggaagagagagcatgtcctgagtgcctgcgggaggaggccccatctgccaacagtgattcctgtcagggacagcccctaaaaccagttcgtcaaatgccaagaggctgtcccgagcaccgtggacccctggtgttggggaccccctttctgagagaggtctgggtcactaagtggagaagtttcttgaacccctgggcctcagcctgtccacccctgccctgggcttgctcacgtgtccagaaaggcgccgtctgccagtgctggttgtcgtgggtgaagcacgtgaggcctggcatgctgcacgtgtcgttgttctgcaggcgcttgagcagcttgcggagtttcttcttgcgcttctgctcccgcaacagccacaccttgtccttctcttgcaggcccttcctatgggcgcagagggccacacacaccttgggcctctgagggatcagtgaccccatgtctctgctcttcctgtccacctaagggcttcgctgaggcttctccaacagagagccatgggcatagcaattcagggtcccaagtcccagtgctgctccaaggcagagccgggaccagaacctgggtcttgtcattctactttaactcccaagggggcacaagctggggacagaaccaggcagctactgggactcctgttgacacccctttcccctccttcctgtgtcctgccctgcttggtggagttgcggtaaccccatttagccacaagggggcgtcggaggcccgctcagtgttgattgggaagtaaggcctcttcgagggctaccgtggacttcccagggaagggcctggacttctttccttttcttctgagttttagcttaagggagggccacctcctcatgcaggcctctgcatctcttccccaggacctcaagctgctcttacctgaaaggatgcagactggagcctctgtgcttgaggcggcctttgtgctgggtgtggtagctgtaacagacccccccagccccaggcttcaggagtggctcagagggctccgctggcaggtgcaagctgtgatttctgggactcccatgtgttgctgctgccccacccctgtccctccttctggggtggtggtgggtagggcatgaccctatcctcagggcagcaggtgcctgcctgagtggcttctttctccaagcatgagccaggactctgcctggacttttgctagactttagcaggttgggttaattgtaatttagccacgactagaagctgggcctggctttaggtgcatcagcctcagcatcctttttcctttcttttttgatggttaattttacatgtcaaagcctcagcatcttgaggttggttccctcaccaccctgcctactcacacttggtcggggtcaacacagggaagcctgtgttttgcaacactttctggaaagacagcagggcttctacagctgtgctgtccagtatggtagccactggccacaggtggctacttcaatttgaattaagcaaaataaaaaatttggctccttagtgacactagccaaaattttaagtatgcaccagccacgtgtggtgtagtgcagatatagcccatttccgtcagcacagaatgttctattagagctgttctagagttcagtcctttgggccaggggacccctaagccgggaacatggacctcaaaccacatgggggatttctgaaagggcaatcggcagaggcacttttccggcctggagccggctctgcgcagccagcacgggtctcttgctagcagtactggaatctgggcgccagcctggctgaggagcaggtccgtgtgccacactggctgacaacagggaggtaaattacggatttttttaatgccatgaggggagaagataaagataaaaataaaaaatgaaaggggtcaatcacgagaggggatgaactgaactgtcctgtaggagagtggggtcttagggaggtccctttgctactgcctcacctgattttgtgacagtcacattcttctggccgctttttcttcaggtgacctcggacttccctcaggttcttaattttgttctgcagggtttcaatctgagggaggggcagaagaggaggccttgaaaccttcaaggctggacaacaaagacttggcctggtgactgcccccacgctgccgtgtctgtgctcagcagcggcagcctgcactccccgggccccagggcaagcaccggcatgtctgggtggggaggaggtacttgttctgcctgaaggaagcccgccttctcctccagccagcccttgcaagggaaccgagtcatttttccggcctggcctgcgcaggaacccgctgagcccactgaggcctccagtgtctcccctgggtttgatgaaaggcctcctgtagcgtagacttcttgtaagtcaaaagggggacaacgtggctaagccatcgtccctcagacggcctgggcaggaagctatctgtctcatgctgggactgacacctatccccgcgttgaggaatctgtggggacctcacttcacctctccagcctcttccctgggtctggcctcactgccctcccactgtgaaccgggggtcctgccaggcccgtggtggccgagagcatgctcctctcccgctctccactcacctcgtggtcgatgtgcagcttgtggtctttccaggcctgcagggacttgtacaggtccaggtcacactggactgtgtcgttctctaggatgtagcacctgcttgagagaagggatcacgtgtggctcggaggtggtggagggggagcagcccaggtgcccaagaggtgtgggaagcccttgccgaggtctgtcctgtccccttcaccctcgacttccacctggacactcaccgatgtgtcactttaatggggttggcggctgaatagtcgggaaggcctccagtgccactgaagtccccaccatccttgtcatcttggtcctcaggggcccaagaggtgtgggaagccctttgccgaggtctgtcctgtccccttcaccctcgacttccacctggacactcaccgatgtgtcactttaatggggttggcggctgagtagtcgggaaggcctccagtgccactgaagtccccaccatccttgtcatcttggtcctcaggggcccctggccagtgccgcttggtgaggtttcggggctgggcggcatcacccaggcctacgtggtacaccctgccgtccacctcgatggccactgagcggatggagcgactgcggacatagctggccttgtactctgtgggcattagaggagtggcagagttagggaggcaggaaaggctggccaggctcccagggcagtgggtccttcatcaagatagggccgggcttccaagcatgaggctcagctttgcctgcgactcgaggggtcgtggaatctacccgcctgctcgcagatcctggaccgcaggggagggcctcgaggtgatcacaccggcaagacggaagtcctggagccaagaagccactgactcaagaggatttcaagcgagagctgcttgcgggtaaacaaatggcggtacatcatctgtacaacggaatatgcgaccagaaccaggagcgaggttctgattcacgctagagcgtggatgaatgtcaaaagcaggcggagtgaaaccagccagacacaaagcgggctcgtattgttacattctatttataggaactacccagaataggtaaatctatagcggcagaaagaagattggtgattgccaggggctgggggagagggtagtgaggagtgactgctttgtgggtacggggttcccttttggggtgatgaaatgttttggaactaggtagaggtgtgcaacactgtgaacctattaaatgcctctgcattgtatataattgtaaaaatggtgagtttgatgttatctgaacttcacctcaattaaaaaggaaaaaaagtatcatggatgtaaaaatgttgatttaaactgggaaaaaggggccctgcagtgcctgtctctgggtagaaatggacggggactggggaagccacttagcttctttgagtcccagagagctggaggctgcccaccaggtggtaggcaggtgctacacccaggtgggccggcaacaaggctgaggggggcttttgcatacgccctgacgctgaaaactcaggggtgcaggctgaagtgacaccccaggtagcctgtatcttctatgtctcaaaaacaaatctgagttggtaacattaaagaaaaaggggaggtggtggcggtgatgtagggatccagatttccagcttccagaaaggaaacagatgtctcacgggcccacagttccatatggtcaggacgggccggggatgggcggcccctttggctgcccactgtcttccctgttggccacagcccccgccactccttcctgttttaaaacctctgcccacctgacacatgtctggccccagcaggcacgcactgcagttgtcatccttctccagatgtgcctcatttaaagagaagggcctggagccagttagtgacccaggttttgttggatcccaagtgaccccgagatggtgaccaaagaggaccagctggaggcaggtggtggcggaaggcagtggaaggagggaggaaagggctcccttctcacgtggcccgggtgccacccccactcttgggggatgttttgtatctttcagttctcagacaccttgcatcagagtcacaagggccgaaggatcctgaggggccgggaaaggcctcccctctccagcagagccttgggccttttctgacacagggcagccttctcctgggcacttctctccctcggtttagtctcccgatgcaagtacacaaattgccgaggatggtccctgtgccaagcaggtcctgccccgagaggctcaggaaatagacccagcgtgtcctctccactccttttgtctcagtcggctcataagtgagctgctttgcctctttccaccctccatctcccagctctagattcaggggtccctaaaccatggcctaagggcccaggccagcctccatctgtctttgtgaatacagtttcactgggtacagctgctcgcattcccttatacctctgcagtcgcagggctgagttgcaaagcccaagacctttactctctggctcttcacagaagcggtatgccagccctgtgtgaatcctttcctggactgaagccacactacctgctctccccatcactctgtgttcatgtccagagtcctggaggtacccttcctgccacaccaacagggaatgggacaggacttcataacccggcggccaagagctttgactctgcaatcagatggctcaggtgcaaacccctgagcacatgtgtggccccggcgatttgggtaacttctcaggatggtgcctaccctacaaaggctccttggaggatggcacgaaacggaactagtgaagcattcatgcctgatgagctggtgtggaccagctactgcagggggtggggactctgcctgcagctgacgtcctcacctaaggtgacaaccctgggcccactccctgcctctccacgccggtgaccgcctgtgtgatgtggctgcccatgcccatggtgcttctcaccaccctcggccacaccggtcacctctctgtgactgggactcaccgccctgattctgagcacagggtctttgtactccatcttcctcctcctcagaacacttgctctctggctggtcacaagacctgctcctttctgtactttgttctcattaaatgtccattgagcgccattctggagccgccacccctctctgctagtcccgccaccgctgcgtctccttcatgcgtttttcaccagcggaagtggccctttgttcacttgttcacatcttgtttcatccatgaggtccaagtccgtgtctctccaggtcaactctaatctcagtgtcttgcacaaagttcaagaaatgaatgaaccccagtcagctgggcccatcccccgagtcctcgtccccttctcctgttcctgggtcccccttctgctgtgagctggctggctctgcctaacctccccacgccacagccaggatccccgtggatcaaggtgggccagggcttcccaaccttaccactgcggacactttggggtcagatcaaactctgtggtgggggccgtcctgtgcgttgcaagatgttttgccgcatccatagcctctgctcactagacgccagcagcacccctccatcacacacaattgtgacagccaaaactgtctccaaacattgccaagtgtcccctgggggacagaaagcccccagttcagcctgctctaggctgactgctcagaaaagagggacagagtgtcttgtcggagactctagcagggggaagaatgccaggcaggagatggggctggagtccccaaatcagccacgtgacccagtctttcctgtccatcatcccctgatgatcacccctgccctgctcacagggctgttgagaggtgcaggtcccggctctgacattacactcacatgaggattctgaccagggctgagctgactctcagctacttttaggtatttttctttcctctaagcattaataaggggaaaagagctgaatttctccctgccagatcttgtattatttaaagattatcgactgtgccacatattgaagcaaggagatgctggctgtgtaatccaatctggaaaccaatcattctgttcagctagaaaagttaatgtagtagttcctaatcagctggtgaggaaatgtaacggagggtcatcagctgggaaacggtgtttcaggcagtggctgggctgttatggagagagacttatctgctccacgatgaagacatttgctgcctggctggctggaccagaggagatcactgcgcctgccgtcagagacctcaatctctaactagtctgtggtacaatatcatccgtcttataaagaatggagactttttgttttttttgagacagtcttgctctgtcacccaggctggagtgaagtggcatgatctcagttcactgcaacctcccgctcccaggttcaagccattctagtgcctcagcctcctgagtagcagggactacaggcgcccaccaccatgcctggctaatttttgtatttttagtagacacgggtttcaccttgttggccagactggtctcgaacttctgagctcaggcaatccgcctgccttggcctcccgaaatgctgggattacaggcgtgagccactgtgcccgatcaggaaggagattccaacacaggctaccatgtggatgaacccggagaacattatgcgaagagaaataagccagccacagaaggacaaatactgtacaattccacttacatgaggcccctaaagcagtcaagctcatagagaagaagagtggttgctgagaacgggtgggagaatggggtgacagcagggtgggagagcggggtgggagaacggggtgggggtgggagcggggtgggagaatggggagataacgttgaatggggacagttgtagttttgcaagatgaagagttcatttagcagataggttgcgtactagtgggaatatagttgacactactggatacttaaaaatggttaagatgataaattttatgggaatttcaccataattttttttaaaaacaacacctaaaatctctcattaggctttggctgtccttaggccagagaaatgggctacgtgggaagctgcccagccttggagggcacacttctagccggcggaccccgacgcctccacacattttcagggcacaggctcattcttgttttaaagtcatgcagggaccattcttcctgtttgatggtgggagctgagcctcagaatggtgaagcgatggcccagggtggcggctgagccttctggctgggtctagaagagtccctctctccacttcgcctgctccctggcttctgtctgactgtcctctcctcggcccttgccgagaatgaggtgtgaaggtgtagacacttcttcagctgagtgaggcttttccccactcaactatagtctatttttgttcttcagggtagtttattttttattttttttgagaccgagtctcactctgtcgcccaggctggagcacaatggcgtgatctcagctatctgcaacctctgctcccgggttcaagcgactctgctgccacaccacacgcccaactaattttttgtatttttagtagagatggggtttcaccatgttggccaggctggtcttgaactcctgacctcaagtgatctgtccacctcggcctctcaaagtgctgggattacaggtgtgagccaccgcgcccagcccagggtagttctataaactcaccacaaacactgactaattgaacgctgaaacatggctcctaggggaagcacagagctgggttcctgtgaacctctggtcctagcattttcaccagccaatcaatacagaaccttgtatgtgtgtttcttccttttttttgagatggatctcgctctgttgcccaggctggagtgcagtggcacaatctcgggtcactgcagcctctgcctcctgggttcaagcgattctcatgcctcagcctcccaagtagctgggattacaagcgtgagccaccacatctggctaattgttgtatttttagacggggttttaccatgttggccaggctggtctggagctcctgacctcaggtgatctgcctgcctcggactcccaaagtactgggattacaggcgtgagccattgcgcctggccttatctgtttattactactgctccccactagaatgggtggctcgtgaggagatgtggctgtgtccccagcccctagatcaccacctggcaaagtgacagtctctgtggaactgtcggagtgaatgaatggggccccccaggcatggtctctctcctcctgtcccactcagccaggttgtgacacttactcttcttgaagagttttttccggcgtccggccaggctgagcttgtagtccccgctgtcacaggtgcaggcctcgctgccctgcccgtagtacttgggcacgaggttggagagggctctgctgccgcccagccgcatggggcccttgcacttatgcagcttcagcttccccgtggcgtcctccacacactgccacttctgaaagacatgccagggcctcggccagctgctcatctgctcccctaaacccgcctctcccctgccacccccatccaccctggagacatccctctccctgcttgcatccagctgttaccgagccccacctctgctatctccaatgccgcttctctccactgccactgcttgaaccttgggcagagctaccatcatcccccagcgagatgcctccgacagccaccactctcacggttacctgcttctgtctgctcctaaaatccacccacatggcagctagaggaatctttttaaagggcaagttggatcatattactctcctacttaaaacccttcaatggctcccactgtctttaagacaagacccaagctcctgatactagtctttgaacatcctctgcaatctggccctggcctacccatcggtcctcctctccctcagccctctctccagtatcccctgtgggctgctgccccagggacttggcgctcactgttccttctgcctagaatgccttttctccagcccttcctgctgctggaggcttctcttccttcccgtctgctccagcgcaaggaggtctcccctgaccaccttcccagactcaatcagtgcagtgtgtgcagaggctccacgtgtgcactcaactccaggcctgtggtcagacgctgaatgtagatagaatcactgtccaaatctctcgtgttgatccttctgctcttccccagttccagcctcctggatcccctcacgggattctgcaaccacctgtaaactggattctcttcccttctgtccacagctgctccagcccattgacccagtgactctttagggcctattctgtgccaaagtgacctttccaggccatgggtcagatctgttccctgtgtctctccagcacttagcatgtgccaagcactgtgtgttaatatattaacttgcttactacacctcacgctaccctacgaggcaggtgctgtcattactgtgccgattcaagatgaggcacacggaggtagagagatgtgtcctgggtcacacaactgggaggtgcaagagctgtaaggaaaagtgtggagtctggtgccaccatcccccccaaccctctgctgcaccgtctgcccccgcccgctgccgttgaaggccctggtgcctttcacctgctcatcttgcccctgtcccgcccatctgttctcacctggaggctgaatctaattgcattcacagcgccctgccaccctcccatccccttcaatgcatgcaggcccttccagcaacctggattccttagtgcagaagtagactgatgggccagcaggcatggccctgaatgaggccagcccagaagcgcctgggggacctggggaggctaaagtgggcactgtgaccggctatacccatctgactgtcgccagaggggagcacaggcccagaagcccaggtctgatttttcaagaaaagccagggctctgagttctgcgtgaagccctgagctgtgtgcgctggcgagcagcctcctgtccacttagctctctctgcctggaattctccttccccactgcctgctccccgctccaacccaacaaactcagctggggcacgacttgaggggtcggcaaacagcagccctcttgctagtcaactccagcccacagcctgtttttgtatggcctgcaaaccaaggacggtttttacattgtacgttttcagagttgtaaaaagcaagaacaaaaacaaatatgtggcctgcaaagcccaaactatttactgtctgatcttgtgcggaaagggtttgctgcccctgcaactactcatgtagaagccgtgtccacatggcccgtcccgaggctgtcctggcgggggcggcgcctgagccccacagggctgggccagtgtcggcttgacttggggtccctacagctgctgagaacgaaggtcccgcagcccaactacctgggttcaaatcctgcctccaccacttgaagctgtgaggctgtgggcagtttgcctgagccctgggcctcagtttccccgtgtacagaacatacctgccagatagggtggctggaggtagagcttacactcacgtgttgcccgtgatgatcatcattacgaggtgcccagggcacatttactcctgcccggcctgggccctggtctgggctttggcaatgatgacatgaattctagccgggccctgcccttaggatgtccccgtgtcaccgggagacagacagatgcacatgagctcggttcctgggcacgtttgttcagcaaatgacaaaaaaacatctaccacgtggggtagcacggacaaggtacccaagacaatgctatggctgggtgtgaggcccctaagagacgtcctcgggccacagggtacagcttctacactgggcagggcattccagaaggcacggcacaagcagggacatggcaacggcactcggggagtaccggcttgtgagcagggccgttgcctgggatggggggcagacgtctgagcctgaggtccccaaagctccggggctgggtcgggggccgtgggttgctgcctcccagctggcctaggctaagtgccccaaactccgccctcagcactctcttcctttggcttcagtggtgtgctctgattgtttggaaaatgctgatacctcctctttcttggccccagcaaagaggtcattctggctgcccaagccctgatctgggtcaggggagacatcagaaagaaccagtgggggacttgacaacgttccctcgtcgaggggcaaagacttcctggcctcctcatttcactccttttagcccagaactaaaatcagaaccacttctgggatctcggtacaaagtcaaggctgaactctctccagaacatcagctctgggagggcaggagcttctgttgagcatgttcgaggctgtggccctgcgcctaggacagtgcctggcaagcggggggacgcattcatgctgtacaacggagggatgaaatccacagctcctgcccggtggcagatacgggttaattgtgtgactaagaggggtctgtgggtttacaaacacacactgggtggggaggcacagtcaggcctgtatgggcctgtactaattctgtgtgcagtgttaagatggagtcattcaaatgcagtccatcagaaacgcatccacttcaggccttggccttcaataccagggccctggttttgctttttctcataggtgaaacaggcacacagctccagccccagctcaaagtcccagcctttgacaggcagggcagggacacacctccggcaccccttgggccagccaaggcagagtttccatcccactcccctccctgccctgccccgcccccgaccctcctctccaagcctgccctggctttccagcctcagaaaagcctccttcaggctttcccaaacatgtcagtttctggctatctctgatacttcccagataattttcttttttcttatgtttttagagacagggtcttattctgtcacccaagctggagtgcagtggcgcaatcatagctcactgcagcctccaacacgtgggctcaagccatcctcccgcctcagctctggagtagctgggacctcaggcatgagccacggactgttcctggccataatttccttaatatttctcttgcaatcaattcactttttaaaaccttacctatatttattttaaaaagccatgtcttattactcctataaaaggaaaaccagtcacaaagaggatactgtcaaagtgaatatggtgaaaataaaataatttaactcctgctggggccttcgtgcaagagagatcggcaagggctagagaggcgctaagggcatacacacacccacgggacacttggcctctgacacggtcagggtccaaaggctgctgagaaatgaatcacttattgtgagcatcatcctgcaccaccaaacagcatcttgggcaccacacggcagcaaaggactacccgttgggaggccctggccctgctggctcagcggctctcagagcctcgcaggtcagggccggctgcagtcaggagggggagccgttgggagggaagggagccttcttacctgtcccagctgctcacacgccgtctggtactcagcacgctgacacaggtccttcacacgctggtacttgggcagaaagttctcctcctgggcgtccaccttgtcattgtctctcttgtgtagcagcttgctatggggcagagagcaggagccgcggggccggcctctcagctctggaggagccccggaggcatgtgtgcccacctagaggggtgccccctcggctccggcttttcctcacagtggagggcgcagggccacctgcccgggtcttctgatgtttaggaaacttaagacattggaattttataagaaacttcccaaattgcatgagttggcaataaattaaataaattgaagacattgtagaggctggacaaagcatgccaaaagcgtacacgtgacctcagaccccaattctgtgtctataggagcagtgaatgggctttgtgtttaggggcctttggaccaacttcagagccatgggcagctcctgaatagcatgatgcggtggggctacagaagcttcctgggcagagggagggaggtgggcaggggtgtccctcccaggacccggcactcaccctctctccaccaagaaggagtcccgccagaccctcatcttctttttcaagtgaaacctggaaaaaagcacggctcctgcttctcagcaacatgagggcttcccacgaccccccgttcccccaggagcagggacggcaccaggagtcagccttggtttacggtcagcctggacagcaattgtggtgagtgtgcccagctgggcactagagcattgcccaccctcctctgagttgagccaccccttccccagagacttgggtctggagacacacacagtagaaatgacccaggtcaaaatcactgtaagtcccacccaagtaactgtgtgtgtgtgtgtgtgtgtgtgtgtgtgcgcgcacacacatctcaagcccctcccaggaagcccagcaactcccccggcactagacgagctctatctcgagttcagcgtcaggcgcagtggttcagcatcaggcgcagtggtttggcgtcttgagctctgtcttgagctcagtgtcaggcgcagtggttgccttgatgtcaggttaattgcattgggttttgggagtattttcttctttggtgctttgcagttgcatgtatgtaatttgtatgtttcatccagtgccacctggtcatttccatttcctagatggggactctgaagctgagaggggaagcttccaccctgtcccctgacccccaggtgtcctggctcccaggccagtgtccccaaacatgtccattttataccattacagcttgcctggcctcacagtcaggggaggagcctcaatggacacggtccccctacagggcagccagatgtgggcacacagtgctcgcctggctggagcctctgggaggccacaggggaagggctccgctgccagaggtgcaagccaggagttgaagtagcacctggaggccaggaacctggtggctgttaagagcgctggccaccagatgtcgctgcggccacaccagcctccccgccctgactcagcccacctcccacctgtctgacttgctcaccctcacggttcctattctgcctctctggacacctaggaatatgttcccatcacaccctccagcattaaagttatggggcgtggtgagtcagcatctgaattcccagagctacatccagacttgctgggatacctccgacacgtcactcaatcgctttgggattcagattccaaactggtaaaatggggatgatgataatgtccacctcgctgggttactgtgaggatcaaattcctagatttccctgcacagtacttagaatagggcctcacacacaagcgccgtgcagttagcaccatctcctaccatcactgctgctatcatttcaagctttgggtaattttagctcagagaaggtccccaactggtcaccttggccacattccagatgggaagacagaatctcggagaggggaccatgcttctctcccacagcaggtaagtggttggcatggcgggacctgagaaccccagctcccgacccttggagaccccacgttctagacccacagggttttgctctgagttcccgcaggtcaatgtcccggccccctcaacacctgccctgctccgtcctcaccgattcaccggccgctccgtgtccagcagcttgaggatggatttcccgtccatatccgcaggtatgtccaggcctgcaatgtccaggatggtgggggccaggtcaatgttgaggacgatgtggggattcctgggggaggcaggagatcggggactcagtcactcaggtggtggtgcctcagcctcgcgtggggggtggggagcggtaggtgggcagcagtttgtgggaggctgacatctgcaggtatggaagctgcagtctggcacctcaacctcagcagctcccctctgcggcccagattcagctgaacccccactctgtgctcgcccccccttagtttctgtgtctcagctcatgccgtgagctgacagcctcaccctgtccccctcctgcccttcctgtccccacttcctgagtgaaggcgaccccccctttacagccagcccaaatcctggcccttcctgaacccttcccctgaacctctggggcagacactggctcctcgctgttccttgacagcccaggcacagtgcagcctcagggccttcttctttaccatcctctctgcctggaatgtcctttccctggagatcaggggccaccgtccctcacccctttagttctttgctctatgaccaaggaggcccgtgacaggcctcagtggtccccagaatccctgtccctggtgatcacaccttaatgtgaccccctcaccttgggtgtggaccaacctgcacctgctgccaaccagtgggttgtgaaggtgatgggctgtcactcccgtggttgtgttatgagatagtcaactactatcctgctagcagtctggctctggtttctttctccccttgctggctttgaagaagcaagccactctaaatcagcagctagactgtgagcagtctgggaggcagactgcatgggttcaagtcctctgcttgcacttgacctgccccatgagcagggacgcagatgctccccagtcaagcctctggatgagaccacagccctggccggcaccttgatttcagcctaagcagacgaccctgcagggctaggcccaggcttctgaccctcagacactgtgagtttgtacatgtgtgttgtcttaagctgctgagtttgtggcagtttgttctgcagcacagatacccaacacaaggcccctcctgaggaccctattcggaactgcgccccctccccaccctccctgctttatctttctcctgaagacttatcaccatctcatatgctatataatttacttatttctctggcttattgtctattgcccagttagactctaagctgcaggaaggctggctcaggtggtcacttctgtatctccaggacttatacccttagaacacagaggagctactcagtaaatattggctaagtgaattcccatacatctgccacctttcctggctcctgtttctttttttgagaggtgtcttgctctgtcacccaggatgcagtgtggtggcatgatcctggctcactgcaacctccacctcctgggttcaagcgattctcatgcctcagcctcccgagtagctgggattacaggcatgcgccatcacacccataatttttgtacttttagtagaggtggggtttcaccatgttggccaggctactcttgaactcctgacctcaggtgatacatccgcctcagcctcccaaagtgctgggattacaggcatgagccacctctcctggctcttgtttctggctgatggcattcccaatgtagggtaagggacttaaggggtgtgcccagcacaggacccaggacctgttgaatggtggacagtcccgtcagagcatctgagtgccttccccgctagttccctggggaccagggcagggcctgggtcctagggtttccgtcatctttaacccctcatctctccccagtccagtgccctgtgaacgtcgggcaggctgccaagcatgtgtgcagctgctgaagatggggctgtgtcatggggggctcgaaggccagcgtgaggcgctacaactgaatccagaggcgagggagctgggaagactgctgagcgacgggcgctctgcagaacccagcaaccggcagctaatggggctgagcttgtccagtggtcccgctcccccaggctcaggggaaggaggacagtggttgcttttcctggccagcaccaatgccttgctctgtgtcacagcttctaattctgtaggaactacctggccccattcagagtcccctgcccaatgtactcagcctggttactcaagggtttctgtcacctctggctacagtgaatggttcagggaaggacacgtgacctaagtcaggccagtgggagtcagcctcaggtcttctgttcaaagcagtttggcttcctaaacaggatggctgaaaatctggagctgctgaccctgccacaaggagaaaaacccacctgagaatgaagccaattcggcggaagtgggactgagagataagaaatgagagctttccaatggcattgtaagactgctggatccagccatgcctgaggctggagctgtgcatggacttttcagtaactatagttactgtgttccttttatcttacatgccttatctggttcaaaggtcatttctgcttgcaaccaaaggagtcctggctgacagataccgtgtgtctttggtcccaaacctgacatgagcactctctttttcttgaccatgtgggatgtggttttgggccctatgagtcagatcacagattccgaggctgaccaaacccccaatgtcagtgtttgtagagccctcagtgggtcagattctttctgttcacagggatggtttgaagtttctgagaggcgtggcagatgggaatagagactgcctggtttcaagccccagccccttcccttacttgctgtaaactcaggcaacttaacctctccgtgcctcagtggccttgggtgtaaaatggggctactatgagcatccacgtcacagggcagttgtgatgctgaaacgaattattaattgtttttgagatggagtctcactgtgtcgcccagacgagtgcagtggcatgatctcggctcactgcaacctccacctcccaggttcaagcgattctcctgcctcagcctcctgagtgctgggattacaggtgtacgccaccatgtccagctaatctttgtatttttagtagaggcagggtttcaccatgttggccaggctggtcttgaactcctgacctcaaatgatctgcccacctgggcctcccaaagtgctgggattacaggcatgagccacagggcccggcttgcaatgaattattatgtagttcttagaccaggccctgaagagtagacactccatacgtgtggactgtcgttattacagctcttagtccaatggggacgctaagagccaaagacgggcgtgatctgataaggtcaacagtcagtcatcactttctctggccttgaactcatgcagcctgcctcctggaattctcgcaaaatgtccaaggcagtgggaacatgtcagtctggaattccacactgcactgtcaacgccttttcaggaggaattccgcagccagccctgtgtgagtgctgggtgtgtgttcccacatctgggcatgagcagaaggcagaccaaatgacagtcttaatagcaacacatctgcttttcaaaaacctcatttgagccagcctccataatatcccagccgatccaaggaagctgctgccgggaacagtggcctgtccgctcccctgccccagacgcagcatgttcgctgccagaacatgtcaactcaaaggttagcccgaggagaatggctggctgagggctgcggcccacgtggtcctccaggaaggatgggagggaagagcatttccctttgtgctgctgcccagagttggctcagctgatcccagctgacaaccagctgcctgtgctgtggtccggggttcctccctgacaacctccaggctcaaagactgcccagcccagaacagaaatccaagcaccattcccacccgctggtgacatgcatgtgcgcgcacacacgtatacagcccagctccctggatttcctggcatacggccccaccacacctgtttccacaggtgctaacagctcccggcctctccttccccagcagagggatataacatgcatgacataattgctttccgctggccctggggtacatctgcgaaaactgtgtgccacccagggtgggcttgggtttgggctgcatggttgaagccctgagctgggcccaggggcctccctgggtccctgggggatgacacacttacagacagccggcttccacgttggggcccctcacgtagaacgggaccctgatgtcaaactcatatggcatggatttccctttcaccaggccaaactggccgatgtggtaaccgtggtcggcggtgtatacgatgtacgtgttgtccagctcgcccgtctcaaccagcatgttgtaaatctgcaacacgggcgaggaggcaagggacagtggggactgggtgcctggcccgtctccgacccggggtgacaggcgcttgagatctcaggccccgtccctcccctgcttcaggtctttgctcaactttcccaggggctgtcccctttgtcactgcaccttcctgcctcttgtcacccctggcccgccctcccctccacggttcttcatggcccttcttggcatccatctcttttacttatctgtggatcatctgtgtccctgccttggcatgctgcctccattagggcagacacttttgtcattttgttccctgcctgctgtatcccacgtacactggcactcaataatgctgtcaggtgaatgaatgaatgagtgaaacttgggctgcagcctatggcaggatcttgcgatctggaagggcgccgtgtggcagaactttctgcattggtggccgtgttaatgtctgcactgtccgatatggacacatattggctccagccacacgaacctactgagcatgtgaaatgaggcttgtgtgacagaagaactgactttataatgttactgcattcagtttaaatagccatggctaaataaaatgtgacaatacccatacaatgcgatattattcagcaataacagggaatgagggggactgattcatgcgacaccaggggtgaagcttgaacacgtggcgctaagtgaaagaaaggcgctgggcacagaaggccacagcgtgtacgattccatttataggaagtgtgcagaacaccaaatctatagagacagaaagagatcaccagttgtctggggctgggggtgagggagatttagtgggccatctaagggctgtgaggtttctctttggggtaagaaaaatgtcctaacatggatgtggtgatggttatacaactctgggcatattaaaaccacagaattgcacactttaattgggggaattgtatggtatgtgaattacatcccaataaatgtgttcaaaaatgtaaatagcaggaaaaaatataactagcatatatggttaccgtattgggcaacacagatctagaaaatgtttcatgaaggaagaggcttttgtctggattgctccaagctgttccccaggtctagcacatggggcctcttcattctgcctttgatttctattcctccaggaaaaccctgaagggccaggaggtctcggccctggcctggctgggggttcggagccacgcccaccaagaggcatgcagcgggcgcctaccgtctccatggagtcgtccaccgacatgagggtctgcaagcgcttccgctggagcatgttggtgaattccatgtggatgggcttcatgggccccgtgtagcgcatgatccagtgtttgtccgggttgggcgcgtagttgtagctcggcgtgctggtgggcaaggacatacacatcggtcaaacccagggacagcctggaccctgcctggcccccgccagacccgcccggatgagcagccaccctgtgctgtgtctgcagcccagggccaggtgtgatctcctggtgggaaaggggacattggcatgtcaggggcttatccaaaccctgtttcagcgtttctccacgtgtgaagtgtgcacttgggaagctcctaagaggcacagcattcagtgaccttgagtgacaaagtgagacagccagtcccttgtcggctctctcagggcaaagtctgtttggtgctagtgtttctttaacacctctctagactttgctcgtcttccttttgaaaaaagggaagaaagtcaagttcagagccttcatcgggaaccagtacccaactcaaattccatagcattgctttgtgtgccttgtacctattattggtagatggcagttacctttggtgaatggcaggtggcagttattgtggttaaggtaggaccacggaatatccttttgcaatagattttagtttgaaataatagaaatggatttaaaaatgaaataagtcatagttttatgtgtaaggccagaattgtgaggaaggcacctgaatgtgcacatttgggacatgccacattcttttttattttttgagacagtctcgctctgtcgctcaggctggagtgcaggggcgcaatctcagctcactgcaacctccacctcccagtatgagtgattctcccgcctcagcctcccaagtagctgggactacaggcgcgtgccaccacacctggctaatttttttgtatttttagtagaaatggggtttcaccatgttagccaggatggtctcgatctcctgacctcgtcatctgcccaccttggcctcccaaagtgttgggattacaggcatgagccactgcacctggcctctttgttttgagatggagtcttgctgtggtccaggctggagtgcagtggtgggatctcagctcactgcagcctttgcctcctgggttcaagtgattctcctgcctcagcctctttagtagctgggactacgggcttgtgtcaacacacctggctaattcttgtagttttagtagagatggggttttgccatgttggccaggctggtcttgaactcctgacctcaggtgatccacccaccttggcctcccaaagttttggcattacaagcatgagccactgcacctggcatgctgcttaatcgtgcagcaggagtgtgttgggcaaagttctgtctgagcacctgtgatgtgagggatggagggaccccaagcaggtatctatgatgatatcatggcagtggttgactataccagctgctggggttcgagccccagttctgtctttggccagttagtcccctcccaaggcatcagttccctcatttcctacccaaggagaatacagacagtgccagttcccaggaaggttgtgagcactgagggagaggctgtaaggggaacccttctaaccatggccagtgcgtgatgactgcttgggagaggttatcattggtgtgtccctttgtcattagtaatcacgggtgactccacggcagaagtcaggtacactgggtctgtcactcactccgtgagacagcgggcaggtccccaaacttctctgatcctctctatttcctggttagtcaatgggagattaaaccaaaaccagaggaaacattgtgagcaaaccaagagcacctccttgtcacctcagtttatgccgggcccctggctccgagctactgaaaaccgcagcatgggggagtctcctgggtggggtgcaccattgacaggaggcactgtttaaggcctcacaaaacgtgggcttcctcgccctgggcctgatggttcttgaaggccaggttccctgcaaatctggcctctcttcccagtcaaggctgaagtaaagggtgagtttccactgcttttcacagtgggtgttctgggggcaaggagctcccgcgaagaagaggaggaaaaacaagcctggtcagaggggcacagacatgtctccctctggcctggtacgtcgggacttcagcagcgtctcagatatcacaatcgtccggggcagaaattgtgacgctgccgctggggtagcttggcagctgtggacaccgttgctatgtaaggcgggaggtgagtcactgtctccaaggctcccctggactcggctttctcagcccctggctgatctgcagcctcatgccactgaatccatcagggcccatgcttcctttcattacagaacggccaggctctcctgtgggctggctctgctgtctcagggcctgacccgccatgtagaacattcccaggaacaagctcagctcccctctcagatctctcccaccgaggaactgaaagggggctgctgggggcagcagtcggacagagacgctctcagagcagcgagcgtgtgggaaaattggtcccgcaggcccaagggcccggattccaggatgcaattttcagcaatcatccctgaatccatgagaagttaggctgacatcggccctcgagaacagtgaggggtgactgttcagaggatgatgatttctgcagccccggctcggagagagcgcttttggagaaggacactgaggccagaaggcagcagagccgggtggtgcttggggtcgacgccagcttgctggttgcctgtgtcaagccaggctcccccagggaggatgtcggcatcttcccatgggcccagctgcctgttcaacaaacatctgaaaacttcacctcctccagcatccgaggaatatctggtgcgttcacaaaagggcgtgaagaagaccatcccccttcccttctgctggggaaatggcgggaagatggtggtgtcctcacagcccctccactgtgtgtctggggccatcagcagcagccccaacatccctcgccccaaagcccttgaagccacaatcagcgccctttgaagggaagctctgagggctggtgggctgtgtctgtgggcacgcctgtgtgtatctttgtatctctgcctatgtctttgtttgcgtgtgtgtatgtctttgtgtgtgtctgtaactgtgtatttttgtgtgtctgcatgtgtgtgtttttttttttcgagacagggtctcactctgtcactcaggctggagtgtagtggcgcaatcatagctcactgcagcctcgacctcttgggcccaagtgatccttctgcttcagcctttccagtaactgggactacaggtgtgcaccaccacccctggctgattttaaattttctgtagagacagagtctcactaagttgcccaggcttgtgtgtgtttcattgtgtgtatctgcttgtgtggtatgtctttgtgtgcctgtgtgtatttgcatgtctttgtgtgtgtctgtatgtatgtgactgtgtgtgtgggggggtgcatggggagggtgcagggccctggggtctgcggggtggatggtaccaccatctaccaacttttgccagagtacacaaggcctgccccaggaaagggcatgtgccggctttctaggggagagatgggataggagacccctaacagaaagatccagtgctctaaccgtgcgccccggctctgtcccctctccaccccttcttgactgtcatcatttaacatcctagctgcaggactttctcttttttggtttctttcggaaatgattatactccagagatgagacagccttccaaacatgcccctaagaaggcaaagggggcttctccacataagagcagacactgctcattttcaatttctgtaattttcatttcaaagggaaaataaaccagcaggcaatgccaaacaatttcatcatgaaattccggcaccgctcgctgctgtttggggtgaagccggcacctcttttagagatgctgccgaagcaaagcgtcccttccctcacccacggcttctcccttagacagggctgagtggcctccacccgctgcagggatgagttctaagtggcggtagggcggggtgccggctgctgggggaggctggccttcttgggtggagaggagtgggcttgggtttggagggggagccagacagatgtgcacagcagcaatgctgcagcccctgggacgcagctcatcgtcttctgtcaaagcctcctccccagagatcaggggatgggaaggtgaacagtgccttcggtaccctctctgagctgcttcgaggtctgtcaaaaagtaattacaggaggggcttgaggagggcaatgtattcagattgtaatgaagccaaacaccctgaatattcaggcagattccaaaccaccccatccttgcagccccagaatgtcacagtaagggctgctgagtcactgctaagcagggggtggtctgaggcagagagaagcaggagaactttccaggaagtttcccagccagctggatagagtactacaggggtgggcagaggcatgggaagcagaagtggggggctggacttgaatcctggctctgccacttagagctgggtgacctcaggtaagttaccttacctctctgtgcctcagtttcttcatctgtaaaatgggaataccaagtgtgacaggcagcctccaagatggcccttgataatctctacttcctggccttcacacccctgcgtagaccctccacattgtagaaggaccggtctgtgtgaccaatagaatgtggcacagtgatggtgccacttccgagattaggttgtaaaagacactgtggcttccttcttggccttactctctctctgatcatttgctctgggtgaggccagctatcatgctgtgaggacactcaaacaccctatggacagaggctcctgtggcaagacccagccatgggactgagccccagtcaagcctcaggtgactgcagccccagctgacaccttgattgcaacctcaggagaccctgggccagaagctcagaacagccactcccagattcctgactcacagacaccgtgagataatttgtgtttgttgttttaagttgctagattctgggatgatttgttacatggcaatagataactggtacaccaagggtcactgtgaatattcagggactggacaataatgccaagggcttagcacagcacctgctacatagcccacagctcaataaatggtggcaaataattagtctggtaaaactatagaccccctcctcaaaagaatgtttttagatgtcttaaataaaatacacatggcattaaaaggaaacctattctatgcagttccatccacacacctcttggtgggaggccgtgtatcccaagttaaaaattctcctgccttggtctgttgcccaggctgtctggagttgcatcccagtttcaccatggacaagcagtatgttcttggggtctttaaaccaggaggattagagaggaggcacagtgaagtcatggtggtgacagtactgttgctaaagcctgaccctcccccttcatgctaagcagtgcctctggcaggcagagtgctgaggcttacatgtgctgagatgcgtttgggaagaggcgtgaatattgtggggctgaatcctcagggccgtggggggctgcatggctgatgaccatgaggactggcctgtgcgggtacatcttcttggacgtgcggaagaagctcacgctgtcattggtgatgaggtctgtgaggtaatcctggggggtggggagagacaggagaacaggtgaggagccaggtattcatactggtgtccactacgtgccaggcaccctgctaggcactggggacacaatagtgaacaaaacaatttctgcccttctggagctgacagtctagggagcagacagacaagaaataagcaagtaaaataaatgaaatgccagacaaatgatgcaaatggtgctaagctaattggacataaagcagagaagtggatagggagaacagggcaggaattgcaatagatcactttagatagatattaaaataggctgggtgggatggctcacacctgtgatcccagcactttgggaggctgaggtgagcagatcacctgaggtcagtttgagaccagcctggccaacacggtgaaacaccatctctactaaaaatacaaaaattagccaggcgtggtggtaaacacctgtagcccagctactcagaaggctgaggcaggagaatcgcttgaacacaggaggtggaggctgcagtgagccacgactgcatgattgcactccagcctgggtgacaaagcaagactctgactcaaaaaaaaaaaaaaagatattaaaagaataatagctaacactattgagtgcttacgatgtgccaaggactgttctgtgtttacctgtatttgctcgcttaattctgacataactatagaaagtacgtatgatgataatccttattttccagaacaggaaattaaggcacagagaagctaagtaaattgcccaatggcacacagctagtaaatgttggacccagcactacatagtcttggctcctaagtctgaagttttttcaaggctctggggacactgtcatgcagggtgggtatatccctaagtccctggggtgcctacactggggcaggagcagacacatgtataaataaagaaccaaggtagttaaaagttatgacagatgaaggaaatatcataaaacagagagatgtaacaaagagtaactgggagctgaggtgaggggcatattttagctggggcagtcagggaggtcctctctgaggaggtgacatttgagttgagacctgaatgatgagaaggagctgggcataggaagatatgtatcactggattttgccagaatcccctggagagcttactgatacctgggcccacccccagagattctggttggattggcctgcggtttggcccaggtatcagacttttaaaaaactccccaggggattctaatgggtactcaggattgagaatcactgatccaggaaagagttccaggcagagataacggggtctgaggcaggaatgtgcttgccatgtgctctaaaaatagaagagagggcagatggcaactggctccttggaaagaggataaaatgtcagagggtaaaatgcagaaatgatataaggagcagcacacacacaaaaaagggatggggatgcagtaatgtctccaggaaaataaggaactgacttacatattgggcaagaggagagaagagttggaggaaaagtaaatggccagaactggaggctttaaaagctcagctaagaagttgaggtttgcctatactctttaatttttttttggtcatggagcaaaaaatggagcaatggtcttgctccattgcctagactggagtgcagtggtgaaatcatggctcactgcagcctccatctcccaggctcaagtgatcctcccaccttggcctcccaaagtgctgggattacaggcgtgagccacagcacccatacaactcttcctgaatttagtaaatatttagctgctaatctttcttcaaggtaatgacttcttgaaatataccctctgctagaaagcagctctgcccaaaacaattactttcaaaaagtgattattttcaagaaaaaaaggtgaagaggtgtctacagcttccaccctgaagtatacaacatatatacataccatgatgtattcatatatctacagacactctttcaggtacactcatccactatatccatatgcacaagaatggccactgcaatattgtttataaaacaaaaacattgcagtgaccagcaggaggatatatgtttaacagtatgcatgtatatatattatacacacacatacatattagagacaaggtcttgctctgtcaggctggggtgcagtggcacaatcatagctcagtgtaaccctgaggtcctcagctcaagtgatcctcctgcctcagccttctaagtagctaggactataggcatgtgccaccacacccagctaatttttcatttttattcttattttgtagagacagggtctctacagacagagtcttgagtatctaacagtggttagcccaagtagatacagctagcaagtggccgcccaggctgatcttcaactcctggtctcaagcaatcctcctgcctcagcctcccaaagtgtaggtattaaggcatgagccaacacacctggtggcattgcttccatactatgcaatgctgtgcagacattaaaaaggcatgtgtaaagttgtccaagatacatggttaagggtaagagcaagcaacagagtcaaactcagaaacattctattttttgtgggggcagagggaagggaaggtgaagaggagaaaccaaactctaacctcatatatttttgagcatcaaggaaaaatctggaaggatatcaaaatgctgattgaagactgggaagaggagagaagcggagaaagttacttgcttctttatatattgctccttgaatattatttatggattaattttggggagtaaaaacaattttataagggggctctacagaatttattacataaaaataatatatgttatataaatcaaagagctgctgctatagttttggaacgtgatataaaggtattagaaaagttcttaaaatgacaaaggtaatttacaatggatctaaaaatggtgcaaagctctgtaccctgacatcaacagtcagggcctgaaggggtcaagtcaggaaatggcatgagaatgagatggaaccgccagtggtggacacttgctgccacccgccagtggggtggggtgggaagccaccgttgctcttcataacagactcatcttcactacttcatcttagaactatatgcctgtttggccgtggttaaacttttttaaaaataaagctaccattaacctccattcctaggagaagatatacaatgggattctaaagcagtgaaaaagaacagagctacgtggatgaacacggatcaaacgtggataaatcttacaatgttatatcgggtgagaaaagcaggttgtggaaggatgtgtatgatatgatatcatttataaaaagtctaaggacacaaacacagcatcgtacattgtttgagatatccacctatgggatgaaagaataaaggtatgtgtgggtagaagctccaggatactggctacctccaggggagggctcaggccggggcaggaatgagacccaggagggtgggtcaggggctcccacagtctaatgtttcaaagtgtgtggggggtgattacagtacctgcctcttgaggctgacaggcaggttaaagcaccaatagatgtgaagctcttgccatagtgtcctgtgcacagccagctctctgccaccattcagctaagaatcaggactgtcttggtggctgggcagatttctccatgtctgagagctcccctccttatccatcctcctcagtggccactcctcggctaagtcttccccgatctctgctagctccgcaatgccacatgacacacctgcctccaaagctgccaccctgctccaccagtgggcagttagtgccaggccagccaacaagagccacccatccctccggccacagggcttcagccatgccctgttctctctgagggagagaacaggaggcctgggccagggtggcgggggcagcatccagcgatgctcaggggcagccaggacagccactgggtggatgtggggtgcgggaggggcgggtgacccccacccctgttggtctctggtttgggcagttgagggaagggtagagaaggcctgggccgggggaaaggctgagttcagagatgggcaaactgtgtttggggtgcccgggtcaagccatgaggaagaactctgaaattcagacctgtgagcaggagggtgagatgggtggaggtccacaggcccaggtgcattttccagaacccggcgcccaggagtcaggctctacccaggtgctgctggcctgcacagctccacagggctgagaagccacagctgggaccccgaggtgcaaccggccccctctggcaagcaccctctgagcctcaggtgattcctgcaggcatccacaagcttcaccgactgagtagctagtgtctgcggagactgccagcctcagccctaggcaaaagcgtgtttccctcgagtgggcactccgcaccgggcttccctccaaggccaaggcagtgcgtgtgggtggcagcagctccacaggctccagacaactcgtaatgaatgatcataggctcttcatgttatcaaataccttagctcagctgatcgtcacagcaactttgacaagtggacattatacccattttacagataaggaagtgaggtccccaaacaaataagccatgcatccagagctggagccaaggcctttgtatttttgggtcaggtccatctttttctccccgccacagataacattattaatgagaagcatacatagtggtttagagcaagtatgcacaaaccgttcctgtaaagggccagacagtaaatattttagactctgcaggccccctgtctctgttgcaactactcattactgccattgcagcttgaaagcagctatcaggaaaatgaatgggcatgtccgtgctccagtaaagctttatgtatggatgcagttttaatttcatgtatttttcacatgtcatgaaaattactcttaaaagctttattgtggtaaaaaaaaaatgagctgtatgctttttaacaaagttttatctgtgaagtagagtactgttaactctaagcaccatgttgtacagcagatctctggaactgtttcatcttgcataactgaaacctcatacatcttgaacaggaactccccagttccccctcccctcagccctgccaaccaccattctcctttttgctgctattgtctgactaatttagatgcctcatgtaagggaatcatgcagtatttgtccttctgtgtctggtttatttcacttagcataatgttctcaaggttcatccatgttgctgcatatgataggatttccttattttattattttgagacagagtctcgctctgtcggccaggctggagtgcagtggtgctacctgggctcactgcagcctctgcctcctgggttcaagcgattctcctgcctcagcctcccaagtagctggactacaggcatgtgccaccatgtccagctaatttttgtatttttagtagagatggggtttccccatgttggccaggctggtctcgaactcctggcctcaagtgatccgcctggtttggcctcccaaagtgctgggattacaggcatgaaccactgcgcctggccggatttcctttttaaaggctgaatgacattcatttttgtatataccatgtgaaaaatgctcttcttttgattgtttcttcaattagttgaaaatgtaaaaaccattcttagctcaggggccatacaaaaaccaccagtctgggcccacgggctgtggtttagtgcatggactttgaagccagatggcctgggttcgaattctgctttatcacttactaggctatgtggcccggttacattacttagcctctctgggcctcagttttctcatctgacagttgggaatagacacagtatatacctcacagactatgatgagaaatgcatgggttaatttgtgtaaaatgattcaaacagtatctggtacatggtatgtctaaatgagtgttagtcattattcctcaagaaccatatgcctacattttctttgtgaaaattaaaatagtacaaaggacagtgaagtctcatttgattagattactccttaccacccccccacccccataaccttggctcttctgtcccctactgggaataacctttccagtgttttgttaggtacattatagtatcactttatgcatctttttatattattaatcacatcatactgtacatattcatttatctatctgacaaatacagcagtgaacaaaacaaatgagcattcctgccttcatggggcttatattcttatgagaagagacagatacttaacaaatgaatcagtaatatacacagggtgtaatgcaccagatggtgatttgttgcagtaaggagtgtggtgggggtgcccttatacaaggtggtccaggaaggctaaagtgaggtgacatttgaataaggacctcaggagttctggaacttgcttttcccactctgcctgatgggctcaggacataaggcagaccggcctcatcctttgccgaggatcttccagaggagggatgcttcacggtcatttagttatttcgtgtattggtggactttgctaatttctttcagtaataaacagagctacaaccagctgctccatcacgccgtctcctgcctatgactgaggcttctccagatagacagagaagtgtacacgctgcggcaaggggcggggcacatgaagttcatagaatctgccaggtcgcccccacactggccgtgcactgccatcacctccctgcagagccacccaacacccaggcccacttttgccagctacctggaagcctcttttcgggtggactcaactctaggtcattctcacttcccttcccactaacaactgtcttcccctctccaaccctcttctgccattagcgcttgtcctgtatcactcttttctcatcaccactgcctctctttctgcccttgacatctggacccctttggtggcatgtgcccatctgtggattagtgacttgggacagagtcctcagaggccttctgaggggggcttacgaagggttgccgcttcctccctgcctgggcctcccaacaaggcccgcccgaggccagcagtgacattctgccttgccagaggcatcttactgcctgatctagggcccagggcacagggctcctgagctctgccttggctggaaaccccgggctcacccctgttcccttgacgcttgggctcctgctgcccactgctaccctcaggatttgaaccctggacctgagccagttctgacttcaccgccccgccctctgcccacgtccctgttagagcatctctgttcccaggcccctggtaactggggggccaggaatcctctcacgcctccctcacagggctgttctcattcacagggggagatgtgtgtgggcaggaaacagggcaaaaggacggacgttctatgtccccatgcttagccccaaaagaatcctgagcaccccgggataacttgattatcgggctgctctgagatgaggcgtggatgtggtgaagaattttaaaaaggagggaatgtatttttcaggatatttagagaatccgcctgcactgaggctgggaggagggaaacagcgtgcttagccctgggactggaatttatattccaaggagtccatgccggactgcctcatcagaactttggaattaattcacttgggaggctggaggcctactatgtgcagaatgagacttgagggcaggccgggggcggcttctgccacttgggcctggacccatcagacttacagggagcccaggatgacctgtcggaggcagagggatctccatgtgtgccggggtttccagaacagaagtgggacagagtgttttttggccgttgagcacctagtcagccttctcctggtggaaactccattcttatttggggctctattcccagccaacgttccagcgtagagctcctgctacccccatgtctggctcaggagtggagcatgtgacttatagtccagggaaccaggcatcctcctggccactctgattggctcagggacagacatgggactgatccagagccaatgagatgcactgagactctctgggactcctgggaaagagactcccatgcttgcagctggccaggaagctgggaggatataaggaaggccgcactgctaccaggaggagagagagcttctgtgaatacagtcgagcagacaaaaacagagctgacagtagagagaaatcaactccttgggggttcatttgaactcctggatccacccatgcctgatacccctatagctggttttcagttaaataggtgaatatatttcctctttgattaagccactgggagttaaatttctgttcacaaacaacttcaagagcctagtctgattaaaaaaaattaccctatagtggctgggtgccatggctcacacctgtaatcccagcactttgggaggctgaggtgggtggatcacctgagattgggagttcgagaccagcctgaccaacacggagaaaccccatctctactaaaaatacaaaattagctgggcgtggtggtgcatgcctgtaatcccagctactcaggaggctgaggcaggagaatcacatgaacccaggagacagaggttgtggtaagccaagatcataccattgcactccagtctgggcaacaagcacaaaactctgtctcaaaaaacaaaacaaaactgagatgactgtaataactagcaagcttggaggttgaaatggctcatactggggatgacaaaatagacgggtgtgatgtgactgtgtgtgtgtgcattaatgatgtgtgcacatcacttaacagtttatatcatatcttcatgtgccagactgtgagctccaggaggaccatgattgggtcatctgttttcattcaccttggaatagccagcacttggcatggtacctggtacacagcaggctctcaatgaatacttgttgggggtggtgaatgaataatggaaccaaatgtgactagtccactcccctcatatgattgttgtgaatatcagaagtactacatgttatcagaagtactactgtgtacccctgagcactacatagtaggtgctcaggggtacacagtaggtgctcagtaaatggaagtacacatgattaagtatgcaagggtatgcttgtttttcagatttgggagttgaggctcttaggagtacgtagcatgtccaaggtcacgtaatatgtgtcaaggttggggctctcaacttgatcccactgactccaaatgtgaaactcaccgtacagtccccggagggtgctggcagaagaacgacatggtgggctgaagggctgcaggcccatgggtcaggcatgctcaattgatgcaagattttagaaaagtctgaattagttgccaatatttaccaatcaggagatttcataggtaaaaaatacaaatttgtggcttctgttgaaaaatcaggaaaagtggccatctgggcccacagttctacctgggcctgatctgccccttttggacagacaccttctccaccgtctccaccactccctattgtccacacactcctggcttgctaccctctttcagtgactgcctgttctctagtgactttaacctgggaagtcacagtaggcagggcccaggactggtggcagtggggatgggaaaagagaaagagggatggatttggcagctggtctggggaaagaatgtaccagctgtggggggatgtcagagctgactctgaggattcagatggggcaggaagatttgttcatttccatatttcttttaaaatgggacatctggatgaaacatcactgtcagcctctcctccttctcctcctcatcatctaagccaggggtcagcaaactacagccaagcaggtcgactgcctgtttttgtaaacaaagcttccttagagcatggccatgcttgtttgtatattatctatggctgctttcacactataacggcagacttctgcagtggtaacaggactgtaagccttgtaaagcctaaaatatttagtatctggccctttacagaaaatatttgttgccctgatctaagctactacatactgagtatttactacgtgcaaggggcgcttctaatgttctacatgtactaactcacgtgatcctcaaaaacctttgtggtaaaaccataatgaaacaccgctacatgcccaacaaagcagccctgacaaaaaagacaacaccaagtgctgataagggatgcagggcaactcccatttccggctggagtgtaaactggtgcaacatctttttttttttttttttttcttttttgagatggagtctcgctctgtctcccaggctggagagcagtgatgtgatctcggctcactgcaacctctgcctcccgggttcacaccattctcctgcctcagcctcccgagtaactgggattacaggcgcccgccaccacgcagggctaatttttgtattcttagtggagacggggtttcaccatgttggccaggctggcctcgaactcctgacctaaagtgatccacccgcctcagtctcccaaagtactgggattacaggtgtgagccactgcgcctggccgggcgcaacatcttaacacatcctatgtcccagcaatccttctttgggtgtataaccaaaagaaatgggtgcatatgtccactaaaagccatggacaaagatgttcacggcagcttagtttataatagacccaaactggagacaaccaaaatgtccatgagttgttgaatgaataaataatacagatctcacagacattgcgctgggtgaaaaaaggcagatgcagaagagaacagactatacgattccatttaggtgaagttctagaataggcaaaaataatccacgctgtcagaagtcagagtagacgtcatccccagggtggggggtcatgactggagaggggtctcagggagtcttctggaagtgctctatgtcttgatcggagccgcggtgaaatggatgcacgcatatgtggaagagatgcgcggtgaaacagatgcacacgtatgtgaaaattcatccagcggtccacttaagatctgtgcatgttacctcatgtcaattcatcttatgttaaaaacagaaaaaactacgactgaggatcaaccactgctgcaggtgctcaggcagcacccactcactccgaacatgcacacgccctgtgctcagcaacgctgctgtgaggaacgggtataacagaaatgagcctctatgctcaccaggagctaggttctagacagtgctcagcagcgctatttgtaataaccccaaactggaaatacctaaatgcccaataaaagtagaagaaataaacaaattgtggtataagcgcatgatggaatgctgggcagcaagaatgaactcaacataatactaagcaggagaagccagatgcagagtgaatctgtaacgctaagagtctgaatcatcgttatcctcgcgggaggggtgtcgagtcgggggaattccgtgaggggactgctgcgggcggtggtgacattctcttcttggcctacccgggtgctcattacacatgtccgttcagtgtgcggcaagcctttgaatggtacactctgtgtatgtactttctgtaagaatattctgtctcggcaaaatgttaaaaaaccaaactcttggaaacagacactattttttgagaaatgaatacatttttcttttcttttttaaagacagagtcttgctccgtcacctaggccgaagagcagtgggaagatcctggctcactgcagcctcaaactcccgggcttaagcaatcctcccatttcagcctctctagtagctgggtccacaggcatgtgccaccacacccggctaagttttgtatttttttcgtacagacagggtctcgtcatgttgcccaggctggtcttgaactcctggactcaagtgattcacctgccttagcctcccaaagtgctgggattacaggcgtgagccactgtccctggctgagagatgaaaaactgaggaggaggtgtatgtaaaatgctcaaggtcacacttttaagtgcctgagtcacaatctgaacccaagtagtctggctcctgagttgggcctctaactgctgggccacacagccactcccaggctggaaaggttgcagcttaccttggagtagtcggagccgtgcttctctttcaccccgttccgacacagcgtgtagttataaaagcgggagtttttaaggagtccgacccactccttccagccgggtggcacgtaggagccgttgtattcattaagatacttcccgaagaaagctgcggagggagatggatcaggaggccacgtgagaaagtgcctgacgatgtttattaaactattgtgtgtccgaggcctgagcatgcacacctgctctgccatggagccctctggcacacagagcaatggatcccttctccaatgttattacgtgcattgaatacaagatataggattacagagaaaatcaattgtttggaaatacggttatcaaaatactaaacacatttgcgatacagtgtgtcttttattttttatttttgagatggagtcttgctctgttacccaggctggagtgcaatggtacgatcttggctcattgcaacctctgcctcccaggtttcaagcaattctcctgcctcagcctcccgagtaatcctcagctgggattacaggcgtctgccaccatgcctggctaattttttgtatttttagtagagacagggtttcaccatgttggccgggctggtcttgaactcctgaccaaagtgttgggattacaggcgtgagccaccatacctggcctactgtgtcttttaaaaccttgtagagagcgatcatttcagaatagttatgagtgaaaatattatattttgcagtatctgcaaaaactgcaatgggatattaaatactggtgatttctacagatgacaaagctacagattctgccaacatactgtggtttatggcttatgctcatattggaagcaaatgctaagtctcagctgtaggttagtgaaaaccagagtgtcactttttttcccattgaagtttgtggatcccttggattctgtctgctatacagcaaccagaatggctaacattaaagaaatgggcaacacctagtatgggtggggatgtgggacaacttgagccctcacacactgagtggctgccccaaccggtccaaccacggtggggaactctttggctgtgtctgctaaatttgaatgcattggtaacttctacccaacaatttaaatcttgggtatttacccaacagaaaagtattcatacactcacctaaactcaggtacaagacatgacagcacatttgtaatagtaaataggtagaaacaaatgaaatgtttatcaacaaaaggatgggtaaagaaattgttgcatatttacagaacggaaggctacattgaaacttgaacgaaagacctagtgctacattcaagaacagggatgcatctcaacaacctaagaatgttaagagagataaaccagatacaaaagaatacatgccatatgacgtcatctatgtgaaatttgagaacaggccaaactaatctatgatgttagaataaaaacagtgggtatcctggagactgggggagggtggctgggagcagcaaggggagtttctcgggtgatgatcttgttctatttcttgctggagcaggtggttcagttggtgacacctcattggcctggagatttgggagccatgcacttttccacatgcacgctttacatcaacaacaaagcttaaagaaaatcaccctaattcatcaggaaggggatgtgcctaaaagctctgtgataaggagacagacaagacctcttcatgatcctcttctgtttttattttgcatgtacattttttttttctttgagacacgtcacactctgccacccaggctggagtgtagtggcaccatcacggctcactgcagcctcaacctcccaggctcaagtgatcctcccacctcatcctcccgagtagctgggactacaggcgcatgccaccatgcctggcttatttttgtagtttttgtagagaaggggtctcgccatgctgcacaggctgttcttgaactcctgagctcaagcgatctgcctgcctcagcctcccaaggtgctgagatgacaggcgagagccaccgtgtctggcttgcatgtataatttttaataattataatctataaagccatatttaagaaatgggaaaatttgagtctagagacagcaatcctattctagtcgtctctttctagatgaggacactgcggttctgaaatttctgacgagtattgctgagagcacagaatatgagcgttccaggaggttgtagggatgtaaggagatcttgctaacagacagctcagcgctgggccttgtgcacgtgagtgcttggccgagaagccaggatgaagagagaaaggccagggaggtgaacccccagaggaaggaggagagtgggtgggatggggctctggtgcccctagaggagaggacaacctatccaccagtgtccttggagaaagcacagagccacctggccctgggggagctgtgatggagctggctccctctgcagcggttttcctggtgacctggcagatggctgacactttccaggagtgggaaaaccccttaggaacccaagcggctggattctgaaacccccaaaatacaaggcaaaggggagcacttcattaaatgacttgcccatcatgcagggccgggaggtgaccgctccagagggaggagctgatgaaacacctcctgtaagggtctgggtacacaggggaggtgaaaataggaagggaggatcccccagcagcctcaggggtaaggtccgggatggaacctccctttgtgtgggaggatggagcaaaaataaacgggaagaacctggcgttctgcagaggaggaggcggggaaccggctgcagtctctgagtctgagtcatatccagttttcacagagtgaaatgtaattaggtggtgggtgcctaattaaacagcgactgggcgtccctggctaggtgtcagggagtaactgatggagtggaggcagcatgagattcccgggcaagctaaaggcctgcacttctctttctctgggacctggaatgttggagatgcctcaatgcatccagctcctcaaagcagtggctcttggccagaaagggggtaatttctgtccccaggagacacttggcaatgtctggagacatttttggtttcatcacaacttggtgtgctgttgatatctggtgggtggaggccaaggatgctgctcaatattcgccgacgcacgtgacagcccccacgctacaaagactgagccaggacaaaatgtcagcagcgcctaatccaagaaaccttttcttttcttttcttttttttttttttgagagagggtctcgctgttttccaggctggagtgcaatggcgtgatgtcgcctcacagcaacctttgcctcctgggtccaagggattctcctgcctcagcatcccgagtagctgggactacaagcgtgcaccatgatgcccggctaatttttgtatttttagtagagatgaggtttcatcatgttggccaggctggtctcgaactcctgacctcaagtgatccacctgcctcggcctcccaaagttctgggactacagatgtgagccaccatacgtcgctgagaaaccctatcttatttaaataaacctgcctatggtccaaccctccagcatctcacccctcaggtctttggagccatattgtgagagccaggaaggcccctggagaccaagtgtagttcaggaaacaagatttcctaaaccttgtgaccttgacccccacctctaacgctgccctccatgcgggggggctccacttctgtaacactcctggcctctctccatgctctcccgtacctcctccgagggggacaatatacagcagaggtcaccaaacctttcctgtaaaagccagatagtcagtattttaggctttgtgggccagagggtcaaagggtctctgtgacaactgctaaaccctattgttagaaagaaaaaaaagaagtcacagacaagacataaacaagtgggcgggtatgttccaataaaactttatttactaaaacaaatggagggcctggttaggtccattggctgtggtttgctgacccctagcatgtgcctagtggatttgaagggccgaagtgggcatgcatagcccaatcccttcccttgcttttcctctggggactgagctgcccccggggagggctagttttcaggaggcttgtcctgtctgcgcggggaggagaggtgtggacctgcatcagtgggaagtctgtcacactctggagtttagtcaggaagcccaaatgctctcagaaggaagccatgccctcaaacccagccttcaccagattcatcagagtgcagtgttgactttcatcagctgactcttgggtctgatttcttaatcggctcaggacctcaacaaggaagagggtaaaatttaataagcccccacataaatcggtattcccattttttctaagaaaaagatgagttttattattattattattattttttgagatggagtcttgctcttgtcacccagtctggagggcagtggtgtaatctcagctcactgcaacctctgcctcccaggttcaagtaattcttgtgcctcagcctcctgagtagctgggattacaggcatggccaccacacctggctaatttttgtatttttagtagagatagggtttcaccatgttggccaaggtggtctttaactcctgacctcaggtgatccacccatctcagcctcccaaagtgctgggattacaggtgtgagccaccctgtccggcagttttattattttttattcttcttttttctccattttccccgtgccccacttcgccctttagaaatgcaattataaccttttatctcccctacaccagacactctcttcagggcaagttcatctaatcacgtgcttagaggctctggagcggaactctcactcactgggaggttgcctcgagagacaatggtccactacaacccaaagtatgcctgctgcgaaactccctcccaggtggagagcttctggccacccttacaacctagttccacccacaaaggcaccagtggctgccagctgacttcccggtagatgaagtactcgagtgagatatgcggacccccccagcactcaattcctcccctgtgtgccattcatgccaggcccccttttaaaaagcaactcctttctgctcctaaaagcaaagcagtacccttaaggcaggaagactgtacttcttcccctaagctagctttggaataaaaaatcactttctttataccagatctcgctcttattacctgcgtttttgttacacccctacagagccccgacactttctactcgtggcaaacaatactgtcagtgatgtaaaagattccttttgaaacaactgaagtccagagtgaaacaatctagggtaaaatgttaacagaatcagtgtacctgggcatggtacacctcatgatggtggcactcgaaattgctgaatttggggtcccactgccctagggaaggtatgcatgcctgtatccattcggcaagtgttgattaaacacctacggtatgcagggagcttcccaggcactggaatcacaggagtgaacaagaccaccaggatcccttctgccctcgtgcagttgatgttctagtggggaatgatgacaaatgcgatgaagaaaataaaggagaatgataggacagagtggccccacgcagtgctgtgagaggcctcgctgggctgaagagcaagagtcagaggggataggaggaaaactgttccaggcagagggaattggcaggtacaaagtccctgaagccagtacaaacgtgggggcatcgcagaacccaagggggacagtgagggagggaggaaatgacatcacggggaagaggggacagatcccatagggtcctggagactgtcatgaggagtggcagggttcgtaccgctcctggaacattgcatgccagattttgccttttgtgcattttcctggaaacaagtccacagcttttgacacattctgaaaggagcccagatcacaagtcatttaagaagcacagattttcaccccctcagtttgcagaaaagtgaactgaaagtcagagaaaaaggcttcactgaactccccactggggaactgggtttcccgctacactcccacatcttccaaatctccagccagtgaacctactggttcttgaagacttgggccaaggtctttctgatgaatgctggagtttagcttcttggcttggctgctgggatatgaatttcttcatagggagtgggtgggggtcctcctcctgcccattcttttcagtgccacggatgtcagcttaatgcaagctgtttcctctgctagcatctcccctttcacgtctctttcctttctccaacccccaacccttaaaaacccaaaaagggtgtattattcagtctccaccaggccctagaaaacagggcttcagtcagaggcttttagtgccaaattagattttgctctcatttgattatatttccccaaggcacttttaaaaatggttattccggcaccagtggaggtgggagaagcaaattagcatgggccccggggctcctgggctgggagatacagccaagagaatgagctggaattaaaaccaagattaaaagcccagcccaaattgtggcaggtggctggtgcctgggaagcttggattcgctgagctttcgaggcaaggacagcacaagaggaggggcaagctgggggctggcgtgggggtgggaaaatttggcaggcagattaagaggaattaatggcaggccaggaaaggccattgacaatgagctggctggcgactgcccctgggcagcagggctggcatctgctgaaaggccagagcacttactgcctcctgtgtgcccagcactaggtggaagcttcacctgcctggctctgtcatcctttgggcaccaacacttccttatttaagttgcacgggctgaccttgactgttgactccaggaatgtgtgcaaatccttgactcccatgaggaccgcattcccctggtgatcatgcacaaactggttagttgaggcaaaggcatgtgacccaagctgggccaactgcagcgagtcagccctgggatttttagggagctactagaaaagagaaggtcttcttcctcaaggcttggaactggtgggatacataactgaagctgctggcagccatcttgccaccaagagggaagagtctgtgtgtgtgtgtgtaaagcaatatggaaaaatgcggaggtgggaaagatagagacagagagacagaagagatagagagatacaagagatagagagatagagagatgctggtttgaggccctggggatccactcttacctgaaaccactttttttttttttttttgagatggagtctcactctgtctcccaggctggagtgcagtggcatgatctcagctcactgcaacctctgcctcctgagttcaagcgattctcccgcctcagcctctcgagtagctgggactacaggtgtccaacaccacgcccagctaattttttaatttttagtagagaccaggtttcaccatgttggccaggctggccttgaactcctgacctgaggtgatctgcccgcctcagcctcccaaagtgccagaattacaggcgtgagccaccgtgcccagcctaatgttttaatttttagtagagatggggtgtcactatgttgctcacgctggtctggaactcctgggctcaagtgatcctcccgccttggcctcccaaggtgctgggaatacacgcatgagccaccatgcccaccatatttttactgtactctattaacatgttcacgtatgtttagatacacaaatacttcccattgtgttaccaccgcctacaggattcagtatggtcacatgctgtaggggggtttgtagcctaggagtaataggtcacgccacagagcctaggtgtgtagtaggctatgccatccaggcgtgtaatgcactccatgatgttcgcacaatgacagaatcacctaacgacacgtttctcagcatgtatccccattgttacgtgacacacgactgtacattgcttggaactggcacatagcaagtgcctactaagggttatattttcattatccaccaatgggcccgtcccctgttatagccaacttcttgctgttaacatctggtttaatggagtccccctgcccccttggagaggatcactagctccccatatccttcctgcaccctgcttcgtggcccagcaggtcggccacttcccctgcaggcagctctacggtggaggctccacgcggctgcttccccatttgtctgagttaagtgctcctggggaacgattcggagcctgatgggaggaggagacccttctgttttctctcccagccccaaatctaactgaaattgccttgtaataattgcatttgtggtctgtgaaagctgtgtctcgtggcgaccagggactgagattagctggtgaaaaacctggcacaggggcacacacggcatcactggggatactaagcaagccacggacaatgggggagacagagggctcctgcaaccagaaaccactgggaacctcggccacctctccctgctgcagacatgtccccgccatgccgggccggcgtaggaacacgctgttcctcccagcatcagttctcccttttcccagtaacacaggtggtaatgtggcagagtgcccaaagcgtctctgcagtcagactgtctgggtttgaatcctggatctgccacctcctagctgtgggaccacaaaggactttgtcccctgtggttgttggcaatgaaacgacagtgcacccccacccactgctatgcacgtggatgaactgacaggcatgcgaagggtgaaacaggacctgatctgtcctaggggcctcccaagaggcagccagcaggacagaaagcacccgctgctttcggaggactttctctcccccacgacgggccatctggctggaaataccaacagggcttctttaaggacatcagcaactttcggtacatgttcatcccacaccatttccacccacacactacattaaaggtaatcgacaaacagctctctaagagtccaaatgttccagagctgactcgctgaatcatgcaacaccatttcattaaatatttattcactttgatttggcaatttgtcctcatattttggaaccagcacacaaacacatctacgcacctgcataaatatacaacacatacatatacacacatgcatgaatacatatacacaagcacaaatacactacatatacatacatgaatatacaacacacatatacacacgagtgaatacatgacatataaaaatacacatatgcattaatatatggcacacatacgcacatgcatagatatacaacattcacatatacacaatgcatgaatatacaggtacatatgtacatatacacgatgcaggaaaatacagtaaaagcacatatacacacatacacgaatacacaacatacacatatacacaggatataaaatcccaaaaaagacagaaatgcatcttgcttcttcacctgtttccttctcacagccaacttccaactggacttctgcctccgcagccttcccagagcccagacttccccaaatggccagagggcccttctgagtccaagagccatcaggccgtctcccttcagggacgcactgctgagctcactctgtttcaacttctctaggtctcacgctccctaggagccaagctctctaccccaccgagcattggcacctgctcttccttctgcctgggacgcctgcctcctcctcaccgtggcacctcaggtcagatgagaagttgtccctggtcacccatccctctatagtcaccgggctgtttatttcctctacagcactctgcactctctgaaattatcctatagatgcatttgttttcttgtttatcctcatttccccaactagggtgtggggtccgtaaggcaggagccgtgctgcactgtagccccagcgcagtacctggcccagagtgtgcacacggtgagcagtggccgacaggagggctgggtaggtgcacctgattgaggtacacagctgtgcaaggtggggcagcgccctctaatgttaagcgtcacacccctcgcccaggagtgcaggagaggtggcaactgcatgtcttactgaaagggattctaggcctggtgtggtggctcacgcctgtaatcccagcactttgggaggccaagatgggcagattgcttgagctcaggagtttgaggccagcctgggcaacacggagaagccctgtctctaccaaaaaaccaaaaaattagccaggtgtggtgctgcacgcctgtcgttccagctacttgggaggctggggtgggagaatcgcttgagcccaggaagtggaggcggaggctgcagtggaccaagatcctgccactgcactccagcctgggtaacagagccagaccctgtctggggggcaggggtggggggagaaaaagaaaggaagggatttctattatagtgtctgcagcacagtgctacatgctgaaaaaaatgggtcaacggagcaggcagggctgccaacctgaagcacatctgtgtgcagaatacactgaaccaggggtgattttgccctgcaggggacactgggcagtgtgtggagacatttttcactgctatgacctggcggggtgggggaatgtgctacaggcatctatcgggcagaggccagggatgctgctgaccatcttccagtgcatgggatggccctcctccccccgtaaagaatgatccagccccaaagtgtcaccagtgccgaggttgtgaaactctgtgtaaagtgcacagtttaaaaagttgtccaaatgtaccattaacgacagggttgcagtgtggctttaaagagcttggtttgcagagtcagaggactctgactccttgggcaagcgagtgctcctgtctgagcctcagtgaattcttctataaaaatgggggcagcaacaaatgagattgtgcataaagaactctgaaaaagggccaggcgtggtggctcatgcctgtaatccaagcactttgggaggccaaagtaggaggatcacttgagcccaggagtttaggtctgcagtgagccatgattgtgccactgcactccagcctgggcaacggagtgagattctgtctctgaaaaaaaaaaaataataaaaaacaaaaaaacagaaacaaaaaagaactgtgagttcccaaaatacagtctgctttccgttttcagggagggggatgaaaacttggacctctggagaaataaaaatggttgttagaaaccagatgtgacaccgttttggaaaatggcaaggcccctccgagactccagtaatgagcttggggaggagtgttcatgccgcacagtgaagtcggctgagcatgacacacatctatcagcagagatgggctggagcgcggagccgagccaatgacaataaacagtgtttgccaaagcaattcagagaggtcggcgaaagatgaagcagaagcctgtggaaagtccgtccttcccaaaacagacccgcgccatttcgcaggcacggagtctgcgaaaacaaaacggggtctttgcccttcgtggcatcatctcaattccagttgtccgcgtgcctctcacacacgtttggccgtttttatgtatcatttggaccgctgcatacttagtaatttccttcaaatcacttcatttggtgtcaaatcagcacttcacaccggcctcttgattttcgccctgtgatccatacatccgtcaatgccagtgggtcaaggctacgcaccatggaggggacttcagctcctctgtcctccctcacatatgtcccagcagcttcaccctcaggacacatccaggtctgaccacttcccatcatccgcctgtcaccatcttggtccaagccaccactgcctctgcctggaccttgctggaacctcgtccctggtcctcctgcctccaccttcagcccatcttccacagcagccagaaggatcccattaaatcacaaatttgatcaagccccccactctgtgcaaagcccttcagtggctccacatccacctcaactaaaatccaaagtccttgccatgccctacaaagtcctataactgtctcctgtcctgctccgtgactgcatctgcccccactttccccccagcctcctgtcctggggtctccctctatcctaccagcaccccaaccccaaagctcatacctgccccagggcctttgcccttgctgttacctgaaagaaatcaccttcctcagatacctgcatgggctgcttcctcacctttcccagctatttgctcaaagcttttaatttttttccaatacagggtcgcactctgtcacccaggctggagtgcagtggtgcggtcgtggctcactgtaccctcaacctccccaggctcaagctatcctcccacctcagccttccaagtagctgggaccacaggcacaagccaccatgcccagataacttttgtatttttttttttttttttttgtagagacagggtttcattatgttgcccaggctggtctcaatgcctgggctcaagcgatctgcccaccttggcctctctcagttctgggattacaggtgtgagtcaccatgtccagcctcaaatgttaacttactggggctcaatcctaaccctcctattcaaatggcatctccccacaccgcccaggctctcccctttcccccgacattgcttctccacatatttattcactggtcatatttatctgtcttctagtttttatcacgtgcttctcccaccagagtaccagccccatgagggcagcggctttctgagtcccttgtcccctgtgtcctcacatctagaacagagcttggtcagtgacgagacctcgatgaacgtttgtggaataaatgggtaaacaactgaaccaacgaacacctcgtaatgggaggcctgtgggagacacagctgagtgagggaatgtcgatttttttttttttttttgagatggagtcccacactgtcacccaggctggggcgcaatggcacgatctcggctcactgcaacctctgcctcccgggttccagtgattctcttgcctcagcctcccgactggctgggattacaggtgttcgccaccatgcctggctaatttttgtattgttagtagagacagggtttcaccatgttggccaggctggtcttgagctgacctcaagtgatccacccgccttggcctcccaaagtgctgggattacaggcgtgagccactgcgcctggctgagaacgtagatttgtttttttatcatccggtgcacaccctctgtgagtggaggagtgggtagaattgttaaattcttgtcttcctatttgcttgtatggtgtttggctggctgaacttggatctatttggcccacacgggacatgacttccatttgtggatgtgctttataaaaccaaaaaagcactcaaggtcagtgtaaggcaacagcagtgcttttcaatatggtcaaaatttattaaggaacccagagtcctgtgtatgttggttatatctagtgatagttattatattagagatgaaaactgagaaatttaaaacatatttgttcactcatttaaataataaactcactacttgttagcatacatttaaaaaatgataaatagaggctgggcgtgatgacttatgtggtcaggagttcaggaccagcctggccaatgtggtgaaaccctgtctctactaaaaatacaaaaattagccgggtgtggtggcgggcgcctgtaatcccagctacttgggaggctgaggcaggagaactgcttgaacccaggaggtggaggttgcagtaagctgagattgcaccactgcactccagcctgagtgacagagcaagactctgtcttggggagaaaaaaagataaataactatatttttcccaaacaaaatacaattaatgagaagagttgcattgttttacatttttgccaatctcttcaatgtcttgtttactggaaggcagcaggattcttaaatctgttttggcattcaatctgctgagatatattgttttggttgtttaacatgaaaaatccagcctcacacagacatgcaggccagggacagtggctcacgtctgtaatcccagcacttcgggaggccaaggcaggaggattgcttgaagcaaaaagtttgagaccagcctgcgtgacaaagtgagacctcatctctacaaaaactaaaaaataaatatatataaatatagccagtcgtggtggtgtgtgcctgtattcccagctactcgagaggctgaggtggcaggatcacttggacccaggagttcgaggctgcaatgagctgtgattgtgccactgcacttcagcctgggtgacaagcgagaccctatttctaaaaaataaaataaaatgggtatgcagatggaaaagggaagagtattttaatcctttttagataactagatatgctatgtacctgctagaaaactccactgtctaccagaaggaaaatgacggtaaaaaggtaaacagtgtcctggtattatcatgaaaatagttttgagtctagagatcctgggaccacgctttgagagccactggtttagacgatgacctacaacatcccagtgaggtagatcctttttttggtccctattttacagatggagaaactgaggcacagagaggcaaagtccccttttcaccgaacatcccacaactgccaagtgtcagagctgaaatgaggctcaatcccaggttgtctgtctccacctgccttttggtgactaccctgttcagcctctcagcaggactccagcgaccacagactggagctcttcccatccacggggacgcagagaggcagggaagagggaacagcagagggactgccccatggctaaaggtggggacacacacaaatgggactcagcctccgagagctcctcctctccgatgtggctcagactatctccgaagtgctttctgccagaattccaggcaaagggaatttccacactgaggttatcttcccatgctgcatcctcccagaattcatccggccgtgggcttttgaaggaaggtcattcccaggacccgggcactttgcctttcttgaagcataggtgggggacacaggtaggagccatagtcgttatccagatcagtctttccagaagtgtagggtttcagagataattttttttttttttttttgagatggagtctcgctctgtcacccaggctggagttcagtgctgcgatctcggctcactgcaaacctccgcctgccaggttcaagcgattctcctgcctcagcctcccgagtagctgggattacaggcatgcgccaccaccatgcccagctaattttttgtatttttagtagagatgggatttcaccttgttggttaggatggtcttgatctcctgacctcgtgatccacctgcctcggcctcccaaagtgctaggattacaggcgtgagccacctggcctggcctcagaaatgatttttatcctccgaggcaggcaggtctgagggctgggcatgggctctggagccaacagcttgcatttaagttcagctacctctgccttccagctcagttttctcaactgcaaaataggaataataataatatccctacatgacaaagttgctgggaaagattcaatgagaaaatatgttaactgcctctaaatggttactgtttttatcataatattattgatcatgatgttatatattcattcattcaatcagtaaacattaaaggaggactcctgtgtggctgggatggctctaggcactggggataccagtgaacaaaacagaaaaaattaaagcagcaaaaaacctgcatcttcctggagcttctgtcctagaattaaggccagtccgaggcagggaactggaatgtttggagactctcacagtcattcaggagacagactgtgatgaccacaatcgtggcaggcgaagggcttgggtggttggttccaggctatttttaaaggtggaaccaatgggatttgctgatgtggcatgcgaaagaagtaaagagagtcaaggataactcaaggtttttggtccaagcaatgaggaggacagatttgcccttatttaggaaagggacactgggaggggcagagttggggatgggggttgataaagaaatcagacacattaacctcgagactcaggttagacattcaggtggaaacagaccaggttcacagaaaagctacggaattacaaactgaggagctgtaagcatttagatggcacttaatgccatggaatcgaatcagatcacctgaggaagaggttcttaatctgttgtcccaagatataatttcctgaaattgaatggcaaaagtatgtatttgtttattttcattaacctataactagcatccccttcaattatgaatgatggtccctgggactttgtcaccaatgggaattacggatattttcatatcacattgtagtcaacatggacttcttaaaatatcatttgagccagcgctacttcgaaatcatggaagttatcagacctatccattgtccattaaataactgcttcatcgtgccattttatgtgtaaagaagcatacatatcacagtttataaaatattttgataaatatgttttcatataactggcttcctttgtaattctctgtattttctatgaactggaggggtacaccaggtggtgtgtgacttctggaaactcccctccaggaagggaagtgagcttcccttatagtttctgtgtcctgctggttggatgcagacaggatgggatgctgctttagataaggacgatcgcccaggatgatggaacgccatctgaccatcacccatcaggagcctgggagccaacaccatgcctgccacatcatctctaggctgtttatgcccaaactgtcaaatgggagagaaataagcacctatcatctctaatccgctgttaattagggactgaagtaccctcaactccacctatattctaataaatcctgggggtatctgtggcacaaatccagtgggctggcgccacttaggagggctcagcaaactatttctgcaaagggccagactatgtgttttcagctatgcagccataaggtctctattgcaatgattcaattctgccaccgtagagccaaagcagctacagacagtacatacactaatgggtgtggctgtgttccagaaaactttgtaaaacctggcagcagactcctgtaggccacagtttactaatctccaccatgcaggaatgttaccagtaatggcaataccatcattatcattattatctttttcaaatttttgttttattttttgagacagagtcttgctctgttgcccaggatggagtgccactgcactcactgcaagctccacctcccaggttcacgccattctcccacctcagcctcccgagtagctcggactgcaggcacctgccaccacgaccggctaattttgttcttgtattttttattagagacggggtttcacggtgttagccaggatggtctcgatctcctgacctcatgattcacctgctttggcctctgaaagtgctggaattacaggcttgagccactgcacctggcctttattttattttattttttttgagacagggtctcactttgccacccaggctggagtgcagtgacatgatcttggctcactgcaaccactgcctcctggttcaagtgattctcccaccttagcctcctgagtagttgggagtacaggtgcacaccaccacgcccggctaattcttttgtatttttagtagagacagggtttcaccatgttggccaggctggtcttgaactcctggcctcaagtgatccacccaccttggcctcccaaagtgctgggattacaggcctatcataatctttttttttttttttttaaagagaagtttgtaatctgggtatttttggttaaatttccagattttaaaaagcatcttgtaactctgacagaaatttggggttgaagtgtagactcaggctgccagctgccattttgcaagatccatatttggcccccagggtcacaaaatagaaactgagctggttcaggctgagttttgatcctacccctgacaccagtagaagagtcctccactgggccactttcatgatctgtcatttggcttcctggggctcccggtctgggcagcagagaacaatcccattaacctagcaggggagctggaggttcctgaggaacagtgataaatgaaaaggaagcccttttgcaaactctagaacagcataaatattagatgtgaaatgccacaggactgaagtctttgtttttttggcagacaaattggctgaggaggcagggctggcaagaaatgcattaaataaacccagagctccacagctctcagggctggggtatttctgatattctgtaactggatccttttaactttgtgctgctttgcaaggttacagcctgagtcgagttcttctgcttttgaaaaaaaaaataccaaatgcaaatcactgcacgaagtgataaatcaatgctataaaagttctggatgccagagatgggatcttgctgaactgaaagctgtgtgaaaacaaatgaggaaggtggggtcatgattccgcacgaaagaggcatcttatgttggaagcagagcgagctgggggctgggagaaatgctctcctcccacttgccctttaagaagaagctatttttttttttttttatgagacagaatttcactcgttacccagactgcagtgcagtggcattatcttggctcactgcaacctctgcctcccgggttcaagagattctcctacctcaacctccccagtacctgggactacaggcatgcgctaccacgcctggctaattttgtatttttttagtagagacggggtttcaccacgttggtcaggctggtctcgaactcctgacctcaactgatccacccgcctcagcctcccaaagtgctgggattacaggcgtgagctactgcgcccggcctgcatgtgggtttctatagtggatatctgttttatttttctgcccagaatccattctcctgtcttttcataattgtgccttcagtcaccaaagagggagggaaccaatctttcccctttctcagccttacatgttctgatgaggctctttctagctctgaatcctggaccaggcccatgaggttggcctggacaatcagggtatctccttttgcctggctgctgtgattgggtgaaagagacataagaccctagatgagccaatgagagctttccctggaacttttgctggagcccttggaaagaggcctctctttcagctggggtcaccacactggggagatggacctgtgggggccatcttgccatcacaaagagggaaccttcctaataaagccaacccaatgacagaaaacgcaagaagcagaaagacagggttctgacagcgtttgagcactgggacctggcaaagtttgcctgaactaatttcgattatgtttcttcatgctggataaatgagatagtaatctaaattccattttgtttttatttttttgctgacttcaagcctaaggcccaagagttctccatctgttcattttttttattcgtttgagttgaggtttcacttgcccaggttgtaatgcagtggcacgatcatggctccctgcggccttaaaggcctgggcttaagtgatcctcccatcttagcctctcaaagagctgggaccacaggtgtgtgccactatgcctggccagtttttaaaattatttgtagagacagggtctctctatgttgcccaggctggttttgaactcctgggctcaagtgatcctcccaccacagcctcccgaagtgctgggattacacgtgtgagccaccgtgcctggccttgttcaaatctttactgagtacccaatacctgcctggtgctatttttggatgggcagcaaacaaaacatgtaaaaaacaagttcactcgccaggtgcagtggctcacgcctgtaatcccagcactttgggaggccgaggcaggcagatcacttgaggtcaggagttcgagaccagcctggccaatatggtgaaaccctgtctctactaaagtacaaaaattggctgggtgcggtggctcatgcctgtaatcccagcactttgggaggctgaggcaggtggatcacttgaggtcaggagttcaagaccagcctggccaacatggtgaaaccccatctctaccaaaaatgtaaaaaattagccggttgtggtggcatgcaactgtaatgccagctacttgggaggctgaggcaggagaatcgcttgaacctgggaggtggaggctgcagtgaaccaagatcgtggcacagcactccaggctgggcgacagagcaagactccgtctcaaaaaaaaaccaaaacaaaaaacgaaaattagctgagtgtagtggtgggtgcctgtagttccagctacttgggaagcagaggcaggggaattgcttgaacctgggagttggaggttgcagtgagtcaagatcatgccactgtactccagcctgggtggcagagtgacagtccatctcaaaaaaaagaaaaaaaaaaaagttcacaaacatgcaagataatttcaagggggcgagaagtcctaagaagaacataaagccgggtgtcatggtcgagaatgagagggttgaggagtactaaccgacacaggaagggcaggaaggaagagagaatggatggaggaagttctccgcagtgtgtgaacaacgctctagaccagggatccccaacccctgggctgcagacaggtagacaggtagcggtctgtggcctgttaggaactgggctgcatagcaggaggtgagtggcaggcgagtgagcaaacttcatctgtatttacagccgcttcccatcacttgcatcactgcctgagctctgcctcctatcagatcagcagcagattatcataggagcgtgaaccccgttgtgaactgtgcatgcgggggatctaggttgtgcactccttatgacaatctaatgcctgatgatctgtcactgtctcccattgcccccgggtgagaccatctggttgcaggaaaacaagctcgggctcccactgattctacattatagtgagatgtataattatttcattacatattataatgtgataatattagaaataaagtgcacactaaatgaaatgcgcttgaatcatcccaaaacatccctcacccccagtccgtggaaaaactgtcttccacgaaaccggttgcttgtaccagaatggttgtgggccagtgctccagacagaggtaactgcacatacaaagggcctggggcaggaatggaccttggaagttctgaggaacaaagaggctaggcagcctgagtgctgtcaccaaggaagggacagataggagatgtggacagagaggtgagcacacccaggccaaacaaggtcttggcagccctggcgaggagatgccagtttatccaaaaagcagtgggcagccgtaggaggttttcagccggaagtgatgtggtcaggtttacaatttttaaaagtgtcctccggctgtgggtggggagaaggaatggccagttgctggggacaaacagggacaagcagatcgccagggcgagaggcgagagctgcttctgtcttgccactccatgcattcctgtcttccgcctgcctgtttttagtgaggctgtggctattgaggaagactgggctgcgggggacaccaaggccctgctgactggttgtagcagggccaggcggagctctgggtgttggtggcatggagggcgggctgcctgtgcctaattaaatgctggctccagccatccgctccctagaagggtcttgcagctcctgcaaatgaggatgaggcccattcattccctggaaactcaattagctgggtatggagggctccatctctagtgacaggttttattgcctgctgagtcaccacgaggacaagctgtgtcttaaatatctgtcttgtgccttttaaagtgtggttttgttcagagggatggactagaggagggggagaaaatccacaacagaccctcagaacaaggcctgtcactcaatggatatttaattatcgccttggaggaatctgacactacttgcacctttcaaagagctgttctcagcgccatcagactgacctcccatttctatgacaaatattttgtagagcgcccttgttttcttgaaaggaaatttataggtaacaaaagctacctatgcatgtcatttccacaaaatcaatataatgctctaactgcaatctacagggaaaataaaaggaaagcaatttataatgaagataaatttcaatatgaaattcccccagcacatccatcaagaaggcacaacacagtagtcaggcagacgcctgcacctagacacagattcactgggaatgtgacaattacaagggcagctgggtgggcgggcgacatttgccattcaaatcctttggcgtagcactgtcatcggggatgggactttcagaaataaggaatgactcttgggaaagttttgcactcaagtataatattgcctccattttcttattccgtacattcctgggaatatgcaaaaaccctccagtatttacatataaaatagacgtaggttcaagactcagatgacaataaacataaaataatctacccatatgagtgatgtggtaggaaactcagaagctatgtggaatacaatgcaatgtgggggccacgtggactctgctgtgcagagcaggacatcaaagtccttcttagtctccgcccccaggaagccagcaaagtcaaatccttcaccatcaccggcaatgcagtcacagagtttaacccctagggggcggtgtgctcccttgagaaccaccagcttagaaagaagtttgcaagccggtggcctgcagaccaatccatccctcaggtgtgtttgctgtgggcctgcccggtgttttcagttgctcattcttaaaaagtagagtgaacagtccacagttgaaatctgggcaccccctccccacccagcctgcctctctgctttgggctacctgccagccctctatgcatttggagcccccaggctagaacgggttcacacagggatgacagaggaagccccgctcccggcctcggtgtaggaactcggtttcccttcatttgctcaaatcccctgcgacacggatggattcccaaaggactcgctgtgtgggctggcacaacctgctggccccgggatggatggtgtctgctgctcggagaacaggaacctgtcctgagaccctgacccgagacccaggaaggtttgggaagacagatcaaggtactgggagcataaggggaagtgagtgcagggatgaggaggaggagattggattacagatgaggaatcacggaaagcactcacctaaagttcgacagccaccaccccctgcgtttttattgccccttctcagtgctgtgtgtcactccccactcccaaaagattttgtttgattaggctttattcttctttcttttttagagacaaggtctcactctgttgcccaggccgaagtacagtggtgtgatcatggcttactgcagcctcaaactcctaggctcaagtgatcctcctgcctcagcctcccaagtagctgggactacaagcatggactaccatgtccagctaattttttttttttcaaattttttgtaaagatacaggtcttactatgttgcccaggctggtctcaaactcctggcctcaagagatcctcctgcctcgacctttccaagtgccgggattacaggcccagccataggctctattctcctgctgtccaagagtcctttctgtgccaatggaaacattctctatgtgcattatccagtacagaacccatgtgcgcctactgaatacctgaaccatggctagtgcacctgagaaactgaaatgctaattgtaattaacgtaaagttaaatagctccctgtggctagtggcaacggtactgggccatttggctccagcctaactcattccagaatgttcagggagtcacagctagcacctaggagaggactacaaaaggtctcatgcactctgaaacccccggaagcctcttgaggcccaggagacagggtgtgcctgtctgtcaccacagtcacccttccctcacttttgaccctgcagctgtttcaacgcccactgcaggtggagattccttgagagaaaccatggttgggaagggaaggctacgcatggagctgatcttcagggcggccacactgctccccacccaggaccacagctggggcagtgaagaggggaagagcggcaggtttgctcagtttgacatcggctctgcagcctttatgggggggggcggggtttaatgtgtgaaagaaaccagccgtcacgagatgaatgtgttccccaaaatatatgctcaagtccttgcccaggtacctgtgagggtgaccgtgtttgtaacatggtgttgtaagatgaagttacgctggatcagagcgggctctagtccaatcactggtgtcctgacagaagagggaaatttggacactgattcagagaggagcaggccacgggaagagagggacccacagggaggaggccgcatgaagatgaaggcagaggctggagtgatgtggccacaagccaaggggtgccaagattcccagcaacccccaggaactcaagggcaaaggaccctcccctgaagcctgcagggaaagcgtggccctgatgatgcttgattttggggttctggctcccggaactgtgaaaatcgccttttgttctaagccacccagtctgtggtccactagggaagtggatacacctgctaagggggtgggacagagagggtgtcgcctggaaacaatcggaaaccctgccccatcggcctcacatcagcttcctctttccccgtggccacttcctcttacggcgcagggaacctctcctcctgggtttgtgggcacaggtcacgtatcactcagggtggcgtcttatcacaggcactgggtgactagtgcttagatgtcacaacactgctgcacagatggagagactgacgcccagaggggatgaggtctcagctcaaggtcacaagggcgcttaaggcggagtctaattctttagactcttgctcaaaacaagtgcttcacttattttgaaatctgaggtcttagagaaaggaagtgactatcaaattagaggaagaaatttcgcttgaagatgtgcacggaggcggcaaatccgtgcctctcgaggacacgctgggtcagcctgggtcccaggaggggctgtgcaattcccgtggatactcggatccccacagtggggaaggctgggtgttcgctgcagagagacaggaaggctacctgctgtgagcagtggatacactccacggggtgaatggagaggctctgctgtccccccacaggccggagagggggagggaagatgggcagatgagaggcagctggaccgagggaagaagggagctgtgtgtgtgcgtgcgtgcgtgcacacttgtgtgcactcaaggagagaggaagagagcagggagcaaacccaggagaagagccaagcaaagagaaggctgccattgtgaaggcagggacagctgcaccaggggcccagggacggcatcccgggaataatttcagtcttctcttccctgtgtgtgcagagaggctgagaagaaagaggaggaaaggctgagatggtgggagtgggggtggagaggagagaaacgggagaggagaaaggagtgtggaagagatgggggtgggctgctggcggggacagaatgtggagacttagtcaccagtcatcctgggaaggtctcctgagcacctacgatggggtgggcactctctaggcctggcaacccgcgagggcacagaacagaggccgctgcttccagggagctggcattttatttatttatttttgagatagagtctcattctgtcacccaagcgacagagtgtagtggtgtgatctcggctcactgcaacctccacctccctggttccagtggttctcctgcctcagcctcccgagtagctgagattacaggcttgcgccaccacatccagctaatttttgtatttttagtagagatggggtttcaccatgttggctaggctagtctcaaactcctgacctcaagtgatccacccgcctcagcctcccaaagtgttagaattactggcgtgagccaccacgcccagcctgagagctggcattttagaaacgagacaatcaatgagacaaatgggcagaatacacagtcagtggtgttcagtggtgatgggggcactggtgggaaaaaactgggatgaacaggaggcatggggtagtcaaggaaggcttctttgaggaggcagcattggaacacagacacgaggaaagtgcagacgtgtagaagttttgagaaaaggaaagaagtgcaaagcactgtgagtgggtgcatgtcaggtgtggctgactgcttgagaagctgtggctggaggacagtgactgaggggagaccaggaggctgagagggttcagagagaagggaaggatcactgggaccctgaggtggctgtcggggcctctaccctgagtaggtgggagccaaggagggctctgcccagaggagaaagagcatctgaactaggttctgaccagacccctctggctgctgcattgaaaacagaccaaggggtcataaacgcagaagctgggggatcccaggagaaacctggaacagggcaggcggggaagacagtggcgcggatgggctggtggcagcagaggggactctgggcatattttgaaggcagagctgacagggtttgctgatgaactgaatgtggagtgtgaaaggaataggaaaaaaaaaatcaagaatggtgctaaggttttggcctgagcaactggaaaactggaggtgccgaggagaagcctgtgagaggcgccggggaggcgggggaccaggaagtgatgctggactcatgcttgatgtgctggggagagctctggggcgatggccaggaggcagaggggccagggtggatggggttcagggcaaggggctaagggtagatccagagagtggcagggaaagaggggcattgggccactttatagcattgcagaggaggacggcccacgcagcagccctcctgcccctgcggtcctgaatgaaaccgctttagggaaaaaacaagtctcatttgttggggatgccaaaatgcctagcgggcgcctttccatcctcctgtgtgagagggcgatggggtgccccaagtgtagtgtagtgtagatggggtggggtcatcaggacacagaggccccccagaccctggtgagggtagctgcccaaggctgatggccaggttctggtcctcagctgacctctctacccagctttgtgcgagaagagtgaaaataactggggcgctcagggccaaaccccaaaacaggctccaactgagagccctggcaaggcctggtcttgtaaggagcatgtaccccctgctcccctgacgcattttagaacatgatgcagaagggcagagggcccgccaccatctctgcgaaagtctggaccggatggcagaagctggggctgggaaacaacttcagaactgccagattcaggtgtggaaggagaaaggcattatcccaatggggagaaaatggcactccaatctagttcaccagaaagagctggaaaaggttgcctttttgttgttgttactttttttttgagatggagtctcattctgtcaccaggctggagtgcagtggtgcaatctcggctcactgcaacctccgcctcctgggttcaagtgattctcatacctcagcctccctagtagctgggattacaggcgcccaccaccacactcagctaatttttgtatttttagtagagacgggtttcactatgttggccaggctagtctcaaactcctgaccttgtgatccaccctcctcggcttcccagagtgctgggattacaggcgtgagccactgtgcccggccagctgatgttactttttttttgttttttgtttgccaaaggcagtgtagtaaaattgtgatcggcactccagtatgcttttccttattctttccagcagcccttgatttctacctggcagtccaagtgctggggaaaaagggactcagccagctgctgcagagcaggtgatccacgctgggcaagttggcacaaaccatgtgctttatatgatgattggctcaggggctggcatgtgactcagggtggtccaatcagaagggatctcatgccttgagcattctggaaaaggatgctctcttgctcctgccagatgtggacaaggaggcacacagctgctggagtgccagccaccatgtccagacctccagcctcgtgatatgatcatgatactcgtaaaccacaagatccgactctgcctgctactcacctgtatcttctctttttttttttttttttttttttgagacagagtcttactctgtcacccaggctagagtgcagtggtgcgatctcggctcactgcaacctccgcctcccaggttcaagcaattctcctgtctcagcctcccctgtagctgggattacaggtgtacatcaccatgcctggctaatttttgtatttttagtagagacggggtttcaccatgttggtcaggctggtcttgaactcctgacctcaggtgatccgcccatccctgcctcccaaagtgctgggatcacaggcttcagtcaccgtgcctggcctgtttagggagcaaaaaattcaatgtttttgaagccagctgcagtcggggttcctgtccgttggatctaaagggaatctattgccatgagcatcacacatcttcaagagcaaacagggcagccaggaagtgtgttcccttgctcaagcagaactcacacatcaacatcacctcctcagaaccgagggggacacagccagagtaaaattgctgagtagaaggagatgtccattttcagctttgccagaaattggcaaactgttcttcaaagtggagggaacaatttaccatcatgctgctggcgcatatgatttcctgttttcctacattctcaccaacatttggtgcgatgggacctcttcatatttgctgtggtcatggctgggatgtgataatgcactgttggctgcgtttgcattttgctgattaccagaggctgagcacatgctgccacattttgatccatgagtgcaacttaccatgacattcatcagaacactggcctgaggtgggctgtgtgatgttgtgctattgtgcaaatcgtcatcgtcattgctaacttttttttattactgttttttaaaaattgagaagggatctcactattttgcccaagctggtctcgaacccctggcctcaggtgatccttccactttggccccccaaaatgttggaattacaggtgtgagccactgcacccagccatcattgctaaatttcccaagtgcctaccacgaccatgtaccagacactgttctaatgtatttaatcttcacaaaactctatgagttaagtgacattattaactgtggttgaggaggccaagacacagaagctaaataacttgtccaagttcatgcaggcagaaagcagcagagactggattcaaacccaggcaaagctaatgccctcaaccactctgcagagagctgggaggtgtctcattctgggaacactgtacaactttgacttgtggatatataagtgatcacaggcagggcaacagcacttcaactgctgaactgtgttaaaggatgactataaaacctttgtaaaaactgaggatgtggcgaggtgcagtggctcacacctgtaatcctagccctttgggaggccgaggagggtggatcgcttgaggtcaggagttcgaggtcagcctggccaacatggtgaaaccccgtctctattaaaaatacaaaaaattagctgggcgtggtggcacgcacctgtaatcctagttagtggggaggctgaggcaggagaatcgcttgaacccgggaggtggaggttgcagtgagctgagattacgccactgcactccagcgtgggcaacagagtgagaccctgtctcaaaaacaaacaaaaaaacaaagaaaacaaaaaacctgaggatgcaattgatccttccaagggtattcatatctgagatccaagtccctcaagttgtaagaagccatacagagaaatattcatgaacaaattgatatttatcctgcttaaacttagcttctctcattttgtcttttgtcaatctccactgcaaacatggggccatgcaaagcaagatcactgcaaaatgaaattgcaaatattttaaaagatgcagggtttgtaaaattaattaaaatgacgctggaagatagctcaaaaaacacatgcaaatccactgacgaataattacctggtctataaagatactacatgaaggagaagagactattgagaaggatgatgaagtatgagatgcacttcacaggggaagattcagatgtcagagaattaggagaggcccttgaaaaaattgatcaaatcctcaaatacttttgcaaaaatgtccctagtgaagtaaaggatatcatcttgtgccatccatttcaatttgtgaaacacattatattcctccctacacttcgtcaattcacttgcttgaagaatcaactcattagttgcaactagagcccaatatttgttaaatatcattagatgcaacctaacagagggccgggtgcgttggctcatgcatgtaatcccagcactttggaaggccaaggcaggtggatcacttgaggccaggagtttgagaccagcttggccaacatggcaaaaccccatctctacaaaaaatacaaaaattagtcaggcgtagtggcaggcgtctgtaatctcagctattcaggaggctgagacaggagaatcgcttgaacccaggaggcagaggttgtagtgagctgagactgtgccactgcactccagtctgggtgacagagcaagactctgtctcagaaaaagaaaaaaagagatgtaacataacagagttattctcgaaacattgtagtttcatttcaagatcaaataccttactaaatacattaaaagcactatttattatgaaatgttggtccacttaagtagcatttttctggggtcagtcttcctcagtttgggctgatctcctctattcaaacgagtatcacaaacacaaatggctaataactgttagggtggcctagacttcacttgtccttcagtatccgttttcttcttctcccacagtaaaataactttcatctgggcaaatgtccacctagaataagactacatttcccaggcccctttgctgccatgcatggccatatgacttgtttctcaccaatgggaaataaggagaaatggagtcggagtctctgaccacttcatagagcagggccaccagaacaacttggaattttatttgacatccccggtctctctcacacacacagccaaacttaaatccaactgaaccaactttgctaggtggccacgtgaacacagggtttaacatggctgaagactcagcaggaacaatttacttttggtccttgggggattaaaaatttacagtatattctaatatgtatgtacaaatcaatctaaaaggaaaaaataatctaaaaggttttgaattcattatagatttttgtcatttttcttagtcaacactgatcagtataacatatcacgcagttggatctttaaaaacatttccactttaaacaacaactcaatataaaactcaaacctgagcttcctagctgccagggcaaagagggaaactatacagggtatgtggctcttattatgtaataacaaggagtacaccagttcatcagactaaacaggtgttttcagggtcctgagttctgaaagtaaggctggaatgggattctttgtacagagtggcattctaaatataatgaataaaattctcagtggcagttttacaaaaacgtaaatgttctcggtatctggctctttacacttgacattacgctcccagtcttcatgagggtataataatgaatcatagttgaataaaagcacttatttagggagacagctttttggtgatttgcatacattcaaggacaagtttgggaaatccactttagagaatgtttattcttgaaatgattgattttctcatgtcgcctgtaagattttgaaacactagcctttagctcccaccctgagccctcaaaatggcacagaatatatgagtttcctttcagtctgatgaatactatttccatgccccctctgaattcccatgatcttgcattccattttgattatgccacaaacacctcactttgactctgggcaggtctcttttttgggctgcagtggccctggctgtgaaatgagggggattgatgagaacaggtctagggtctttactgatcttccagcatccaaaacgaaaggtttctgtacagacctttcacccagaggttgtgaaaagagagtctgtgagccacacactcactcctcagacatattttctttggcccccagtatacattaaagaaaaaataagctgtgccggcatattttaaaataagattttcagtgaaatattcagactttaaaacatttcaaggctggtcactcttgagtgcatggctgtactttctagagccaagttgcaggtgcatcttcaataagggcccactgctgtgctgcgggcctgcctgtcctgcttctgctagcaacatccaggcccccgccaatcatctagggtggtggccatggtaacttctgacacatgtggctttctgcagaggctcaggggaaccaacaggtggttgattctgcataatggcacgcacaatacacaggaacaaggtataggaacgaggccttcctagttctcagcagaacatactttctaggtgattctggctatgggatgaggctgtaagaagacacaccttactggcttgctccccacaccaaagcatccctgccagcccacactgtgtatctgagaggaagctgcccagcctcgagggctgcaggtccagcactgcggacagggctggaggaggagtccatccttcccttgcggcactcccacccaaacaaaccccttgtcacttggatgcaacttcctggggttgcaacatctgagccacaatatcttgatttcacaaccgccgcggcttcttacccaaggcggggagtatttatttatttttaattaaagcaagttaaatgaattgagtctggagggttttgcaatggcgctacaggtaagtgactatactgtaattgcatctctacctcagacaaccagcctggcaggtgagccttcagagcccaccaaagacctcctgaaggataagcaaacaggaactgggtcgccctccacccaggatgacacgggtgagtgtggacagtcaaccaccatgtcagtttctgcaccaccttggttactgccacgtagaaagcgaccacacagccccattatctgttcccctccatgaattcccatcccccacccctatgttttggaaccttcttccaagctaatggtttgaagtcaacgaaacagtccctgatgggcttaataactattaacagaggatgcaaactcatgcatgggcaccttatggcctctccacactatgattcatagtttgaaaagactcacttttttgggggactcaaattcctttgacaaggtcactttacatcactactgtaggcaaataaatctgtatttctttaatacacacagaaataaatgcacaactctgaaattataagagagttgctctaggggctatccagaatcaacttgggtaccgcagtggtgtgcagaccacacctagggacgcccgccctggctgtcactcccttcctgcacctgcccccgtccctgctcacctgtccggtagccagtgctattgaggtacacggcaaaggtgcggctctcgtgctgtgcctgccaggagggcgaggagcagttctcattgttggtgtaggtgttgtggttgtggacgtacttgccagtgaggatggaggagcgtgaggggcagcacatgggtgtggtcacgaaggcgttgatgaagtgcgccccgccctgctccatgatgcgccgggtcttgttcatcacctgcatggaacctgcaagtcaagggtggaagtaaggcgcagggcaggagacccgggcggcaccggcaccagggggctctcagcacgtggcatccctaggtctggagtgggcacattctgcagacctacggggcagacggggcaggggccactgctgcacggtgggactgtcctgcataatcaggaaggaccctgggtcccgagtccacctggacactcctgaggtccaggtctggagtctggaggattttgcaatggtgctggaggtgagtgactgtaagtgactgtactgtcactgtccggtactgtaattgcatctctacctgcaaggcaggtaaaaacctgtttataaatgacctgagactggaatcaaactgttttacaaattttaaacacaacattgtttttgcagggtattaatatacattgttttgttttttcttttggaaaccaaccaccatgtaaattgagggaagattatactttcttttctttggaactttcccaataattgtttgctcttactgaaatctggtcatgccaacctggtggcaaaccttctccctgagtattccctggctgaggtgctctgccatcagccacaaaccctgctggcctcttgtccacacttttcttcgagcctggaacccaccacccctcaccccaaatccaacccatcggcctagtaccctctcgtagggagcctctggcaccaccctgggcttgagagctctgagcagtcttgcagcatgtgtcctgagtactgatcataccccaggcttcgaggtttcggtcatgcctgctcttgtttctttcttttctttgtttttttttttttttttttttttttgagacagagtcttgctctgttgcccaggctggagtgcagtggtgtgatcttgactcactgcaatctctgcttcccgggttcaagcgattcccctgcctcagcctcccaagtagcccctatacgcagctagtttctgtatttttagtagagatgacgtttcgccatgttggccaggctggtctggaatttctgacctcaagtgatccgcctgcctctgcctcccaaagtgctgtcattacagtcatgaaccaccttgcctggccatgcctgctcttgtttctcaaccaagctgtaagcagagcaagacacttaggaagaaaggcaagaaggaaggaaggaagcaaatgaacgtgtgtgggagccctactgcgtgcaggccaaggtcccaggagggcaaaggctgtgtgctccgctcagcgctgaatcctcagcactgctgccgtgtgtgacacacagtgggtactcaacataggtgtgacgagtgcatgctcaattgtatgctgtggttggtacccagacccttagtgatttgatggaaatattccatggaaaccctctctccttcttctatggccatccttggtttttccccttttccttgcagttcttaaggtgtgcagtgggttgaacggtgcccccgtcccctaaagataagaccatgtcctaatttctggaagctgtgaatgtgaccatatttggaaagagggtgatatggtttggctgtgtccccacccaaatctcatcttgaattgtggctcccatatttcccacgtgttgtgagagggatctgatgggagacagttgaatcatgggggttgtttcccccatactgttctcttggtagtgaataagtctcacgagatttgatggttttataaaggttttccctcttgcttggttctcattctctcttgcctaccgccatgtaagatgtgcctttcaccttctgccatgatcctgaggcctccccagccacatggaactaagtccattaaacctctttttctttctaaattacccagtctcgggtatatctttatcagcagcatgaagacagaccaatacagggtgtctttgcagatgtaattaaattgaggctactgaaatgagatttgttctggattccccaggtgggccctaaatccagtgacaagtgtccacataggacacaaagtggagaagacgcacaggcacagaggggaaggccacattcaaagggaagcagagactggagggatgcacatacaagccaaggaacaaggaactcctagggtccccagggctggaagaggcaaggaagggctctcccctagagccttctgaggaagcacagccatgctaacaccttgattttggacttccggcctccagaactgttgagagagtaaatttctgttgttttaagccacccagtttgtgatctgttaggacagcagtgggaaaccaaaacagggtctaccaggcatgtgaaggctgtgatcccaatcacctagcaaccccctagaaacctgaaaacaagcatcagacccactgcagcctcctgggatctggggaaggccctctgctcagcaatcagctgcttctactttaaatttttaccaccaatcaaggcaccaaggtcgtgcccctgaggtcccagtattgcacattggccgccctcccacctcctggcccctgcctcagccgtacccccagcctgggatgctctcactcctccaatcacagggctacctctgtctccttcaagttattgatcagacaccaccttcttggagaggccttccctggcctgtattgaaaccacctcccgcaacccatagcactctccactctgcttccccgctccgtgtctctccacagcagttactgtcctcaaacataagtcattttgatttcacttatttgtatgttgctgccttcaccacaagggcagagactcagcctactttgttcactgcctagcacagtgcctggcacataatgtgctcaacagagaccagctaaattaacatataaaatactatcttacactcgggttttcatatctcaggaatccaaaccagttggtgtccacagacctgtgtgttggtgtcttgtagagtgggttttaaaaatgtgacattaaatagcatcacacaggatatgtgctctccagtttgccacactcccccgtgctccctacagtcttacaccacctgcacccactctcattacctgcccgacccctgaaggcttgggtgttgcaaccttctgatatagctaaggaactgagagcactccaacttattcctggggaagagggcagtcttctatgccagtaataatcattataattaatagtggcgactatcactggctgaatgcttatggctgggctgaagacattcatcacttaattctcccaatggcccatttgacagaagagggaactgaacctggggagctgaatgactggctaaggctgcacagctgggaaggcagtgaagactcaagcctagcagaggcggggtgctgagtttcacgttcacaaaatgtcacagtcacacgggaggtggtaacagtgtcctgaggaagtgcatagaggtccccatgctcttggtccactcttggcttcagttaagctcagaatggtcccttggtgacccagaagggggtcctctagtggtgacttcatcaggcacaccaggggtgggggtggcccagggtcacatcaccaaacaccagggatgctggtggtgtgaaaggccactgggagctccaggcagggggtggcattgccttagattaattgcgtggcttggtttccttctacttagggcaagtaaccttagcttttcctttagggtggtggaaatcctcttaaaacaacaacaacaacaaacaattgcagccgatttttaaaaagtaaataatcgtacaagtggcacacagatatatgatgaaaattgtgagggaatgattagaatttggcaatcattggcttggtaaaacccggacctgacatcccttgatgtgtggcttggtacaaccctgacatccattgatgtcattcggctgtcgattagacctcaggtgccacacccacagccaagccctgatgtcaccgtccctcctgctcctcccgaagccactcccctttcctccgggtacttgggcaatcatcttggctacggttcctcccatctttcagttcccacatccaatccatcagcaaagcctgttgccctctcttcaacgtaaacacccacgatcgtacccttgccacctcccccgtgggtcaggcgatcatcctctctccctgaaatcaggccagttgcttcctgattggactccagtcacttattccccacggtgtagccagagtctcctctcctgacactctccggggctcctgctcactcagaggagcccaaatctttctggccatccacagagtgtggtgggacccaatcccctcccctccctaaccccatccccctctccgcccactctctgcagccacagggtcccctgctctgtccacagactgaccaggcgtgctcccatcccagaacctgtgccctgctgttccttctgcctggaagacctctcccccggagccccgcagcggtgccctcacccccttcttgtctttactcaaaagttcccttctccgtggagtcttccctggcccccaatattttctactcccttccttgcctgacattttcaaccctgcactcatcatctaacacatgatatacttttatgtttttatctactgatcccgtttgctgttccctgtgacttttgatggctccacagctcagcctagaacagtgcctggcacgcagtgggtgctcataaatatttcttaaatgcacgagtccagggcaccccaagtggaatcgatcctttgctccctagtcccaaacacgaaggagaaaggacgaagcagctggtagtgagagctcagcctctctcggtctccagaccctgcagaaaggacaaaagctggccacccacctaactggtcagacccttctcctggaagggaacgcagggcaggccgtcacctgatgaaatcacctgcactccgcagcccccagtgctgccttggcaaacagtgaacagcctccagaaccatttcttgtttttaatgggctcagatccagggtctcgaaatgcttagatctccttcctcctcattccagaggaagcgagctgtgaggtgctcttggccagcactcacccttcccaaatcagctggcggaggagcgctgtgtcaatccacgagtaaaggacaacagtgccccggaatgacagcagcatctgtgcatgggcagtgctatgtgctaagcctccccttggggacagtaacctgctttattaaaactgccatagcgacgaggctgtgtaaacctacctctgtaacacaaaaacatatgatctcatccccttgcccagccccagccctaatgcagaaggacagctccgacgggagggaaggacctgaacgacacggccacacagaaatgaaaaggccagttttcaagcttttcaatgcagctgggccagccaacctcaacttctttcgtccaacataaacctggggacatgcagacaaaaacagacccggtttctttccatgaccaaaccttcccaccatactgggttgagggtgaggtcactctgacacctctgtgactctgatgggctggagaggcctcacccccaggcccatctgttgggatttaaacttgggggcccaaaccacccaactgctagaatgcagtttctcccatgacactcctgaactgcctccccattcacggtggctttttgggggcctgtgtaccactgtgctatgatttgtttgatatttgtatttaacgtgatttaagaaaaaaccctttaatctcaatccaagttaactacgtcgagttagagaattaaggtgtgagttatatatatatatttttggatgcaccatccagtaagtccatcgttgataaaatcaatattttgctgacctgccacagatgacgacgttgccagtgtcataggaaatgctgaatgaatttgctcttctaaaggtctaagtcagagcaaacactatctatggggacttagcaaggtgccagggagtttcaggattcaaaacatgattttttttttttttttttttttttttttttgccattcctgaggcttaggtggctcctatctgttggaggcctgcttcagctgggagcaggggaaccctgtacccctcccagacaaatccctgcggccctcaacttgggtgattttgatgtataactagtgagatgccttcctatggctagtttcttaaaattatagatattattagagtctgtgatggcagggcctcctagggaaagcagcagaaggaagaatggggcagggagaaaaataaaggcggagtcagtaaacacaggaccttgacttaaattcactctaatcactgttttctctgcctggactattgcagtaggctcccaagctgttctattctccgtttggtggccagaggctttttcttttgagacagggtctcactctgtacccaggctggagtgcagtagtgtgatcacggctcactgcagcctcgacctccccaggttcaggtgatcctcccacctccacctcctgagtagctggaattacaggtgtacactaccacactcagctaatttttgtattttttgtacaggtggggcttcaccacgttgcccgggctggtcttgaactgctgggctcaagtgatcctccttccttggcctcccaaagtgttgggataacaggcatgagccaccatgcctgcctggccaggacttcttttaaaacagtcagtgaaatcatcatattcgttgctctttgtcttccagtgactgcccgcctcactcagagtaaaaatcaaagtcctccctctgtcctacaaggtcctcagtgatccggatgctcactcgccccaactacaactcctactgtgcgctctctctctaagcttcctctgctccagtcacattgacctcctccttgttgttcctcgaacacaccaagcacgcttctgcctcaggacctttgcacctgccactcctcagcccagactcagtccctcattgccttcaggtttctgcaaatatcactttctcagcaaggctttctctggactgtgctgattagaatcatgccctccccttccttcttgccttttgctgctcttcctggtgcttccgtgtgagtaaatgaagagtaaacattcttaggggacatgcaggctacagattcttaggggacatgcaggtgcctttggggtgagtggggtacacggtgggtggggagtcaagggctatctctgctttgcattacttggatattttaaagttttgcttgtgtaattttattgattgttttgagatggagtctccctctgtctttcaggctggagtgcagcggcgcgatctcggctcactgcaacctctacctcctgggttcaagcgattctcctgcctcagcctcccgagcagctgggattacaggcaagtaccaccatgcccagctattttttttggtgtgtatttttagtagagacagggttacaccatgttgaccaggctggtcttgaactcctgaataaataaaaaataaataaatgcagcaagagggccacaggtttctagaacaatgggagagggcaggatttggcacttggcattcctgcacgggtctgcaggcctgtctgtgtgctacccctatgtgaagcaggccctgggatttaggggaagagggcacacagtgggctttctatagatgaccgaaaaatctatagatggtcttgaactccagggctcaagtgatcctcctgccttggcctcccagtgttgggataacactgttatccactgtggccactgttgtggccacatatcacctgctacactctacctggggccagtctgctcccaggggcccccaagctgtgctttctttccttgaggagaggggcattaaagtccacctggcatggggcaggctgaggatgaagggggcaccacacacccctctccaggccgcgtccttctcctgattcctctcttacctgttttgttttgtatgttaaaagggttcagctgctacaaatgaatatgtgtgtgtgtgtataacacacacacaaacagatgcacatatacacttcagtcctagactgaatcaccaggtcctttttcatctgtagactttgggtgccaaagagcactgaattgagaggccaagaatgaggtgtgaactgccgtaaatcactgactttgagcttcagcttccctgtctgtaaaaacacagcccataaataactttaggtataaggtttgactatgaaattctaggatagattctagaacctatcgctatgtcaccatactcaataggatgaaaaaggttttcagtcagaaggcctgattccaaatcttgatttctgccacttcctattaaccaggtaccttgtgcaaatgatttagccaccctgcacctcagtttccccatctgcaaagcgggagaataacagtgcctccttctcagggttgttctgagttttgagggaaaaaaaaaaaaaaaaaaaaaaaaaaaaatatatatatatatatatatatatatatatatatatatatatatatacacatacacacacacttttttagttcaatgcttgacatacagaaagcacttaatgcatgccagcttttatttatttatttacttatttgagacagagtttctctcttgtcacccaggctggagtgcaatggcaccatctcggttcattgcaacctctgcctcctgggttcaagtgattctcctgcctcagcctcctgagtagctgggattacaggctcccactatcattcccggctaattttttttatttttagtagagatggggtttcaccatgttagccaggctgttcttgaactcctggccttaagtgatccacctgccttgacctcccaaagtgctgggattacaggagtgagccactgtgcccggccacatgtcagcttttcaacaagtatcgtctcacgcggagttaaaaaacggagtccctctagactaaatcttgtctgcatgtgtgtttgatttaggtctgcccaaaaggaaaggattttaaaaattgaatggcctttttctttaattgcgagatttcacatcaattcagctttctggctttgcttgaaaaatgcaaagacctggctttgatgggcccacagtgggctggacctgagtagcgaaggcccacttgacaaggtcctcctctggtcttccaccacccctaccatgccgacttcctccttgccagcacgtgcctagccctgtgggcatggagtttgcaacccttagctgattcaattccaagtgaagggagcagctaaataaatctgcaaaggtaacgctctactggggcccagagacctgcagagaacaggcattcagtggggaagagaggctgtggggtcaggtacaggttggaacagagtcttgacctggacaggtgggggatgaagagggctatgaggtcgagccacaggcgggaaagaacctgtgtcctgcactgacctctggctactggtgtccacctaacaggctggaactcattcagcagccctctcctggccctcaaatgtccctggaatgtccgcagtgctgtaggatcagcttgtgagctccctgccatgaccaaggcaacacctgctaatgggctgcagcaggctgggctccatcagacctgaccaactgccccagaatagctctgtctccagcagaggggagagaaaggcctggggcacaaacagcagaaatcgggagccacacttgggcaaaagaaggatgagttcatgtcctttgtagggacatggatgaagctcgaaaccatcattctcagcaaattatcacaaggacaaaagaccaaacactgcacgttctcactcataggtgggaattgaacaatgagaacacttggacacaggaaggggaacatcacacactggggcctgttgtggggtggggggagaggggagggatagcattaggagatatacctaatgtaaatgacgagttaacgggtgcagcacaccaacatggcacacatatacatatgtaacaaaactgcacgttgtgcacatgtaccctagaacttaaataaataaaaaaaaaaaaatatatatatatatatatatatatacacacacacacacataaaaagggaatctcttatttttcacctagtatagatgtgctcactgctgctggtggcaactcttgctgtgcctgtaactcaatccagaataattacactggattctggagacctgttgctcagaggttgttgtttttcttttgttggtgcaaaggtgaaccattcctgactcttggacattacaaaataaagacaaatgttattgctggtttcagctacgaaaagccaaggctccaaatcggttcctaaacccaaaatcaattaggcagatgtcgaggaggcaggactgagattctattaataagcatcgggttgtcagagagaccatgcagttaattttttctccgttgctttctgctgcctctggttgcagaagttcctgggagaaaattctgctatggtcatcgtcaaccatagcagagaggtggcagagcacacgtgggaaagggcagggcttgggtgtaattgacgaggctctgcaatgattggtcatttcctctctgagaaactccacccagaaatattcctctaactcaaaatgctacaatcaccatccctgggaggggatatttattcaatggggcagggcttccagggtgttttccccacttttcagaaggggctacgcagagctgctgcccagccacaggcctggtgggtgatgtttgcaaagcaacctaatgtcccccccttccccacctctcccaatctgttcctcctgcccccgccttcccatctctgtaaatggcactgccatctgcccaacggctcagccaaaaacctaggagtcatccccgattcctcttccctcacccacccactcacgatccataaagcaaaccctgccgaccttccaagcagcaccggaatccacccacctctctcgctctgcagtgccccgtcctgctccgtaccaccagcatctcccacctggactgctgcaaacaccacctgatctccctgcttccgctcttgtccctgggccaccctcttcacctacagccggggtgtgcctctgagaacatgcacgcatagctgaccagctcagaacattctggggaccttccatcgggcatgcaatcaaatccagaccctgctgcatggcctgctggggaccaccaggtctcccctgtctgctctctgccgccctcttccccatcctcctccccttcattcccatgtcctgctgccctcctccaacgtcctgggaaacctgttcctgccacagggctcttgcacgtgccgtgcttctgcctgcagtgctcctgcctcgggtttccacatgaatgtctcctcatgacacaggtctccccagtgttaggccacacaaccccacttcccactgctaggggagctgccctcactgggacccttgctcctgatctctggtgttgctgagaccctcagttgcccacaaatatctctttctccttcttcctctgatcaggctgtgactttattttcaatgcacccagctaggaaacatttcccagattcccttatggccaaagatgtgccaggagcctgcctgccgccttccagccctgctctctgtccagttctccaccccagggcactggcctggaggtgctggttcaacaagccccttcgctctctgggctttgggttggatttgactgacaagggcccctggcaggagatcggagaaagaagagagtgaggttggtggacagattcctccaccttcctctctgtggtgccaacagagggtgacagctcttgtggggtgaccctctgtgtccctgggttccagtaacctcttgtcccactgttgctaattagcctggggcactgccctatccctagtggtttcctcgcacttgctcacaccttagcaaaaaacacttaaaccgtcttccaatgattcaaatttgcatgtgctttataattctcgctgagatcatgtggctaagtaaataagatctattcgtgttgcatgtgacttctgaagtggtttttttttttttctttttcctgcccttctgcctctgcttccttcttcttgctgcctagagtgtggctatgagagctggagctccagcagctgttctaaccacaaggtgactttgcagatggaagctacgcagtaagtatgatggaacagaaaggcagagaaggagcttgggtccctgataaccttgaagccaccaagccagccctagactgcctacctccagacatttgtataattctgtcttgtttaagccactgttattttatgttttcttttacatgcagccaaacctaatcctgatacacttaacttccagaactcaagtgatctcccaaatgttgctgaattgaaaaaaaatcatcttacaggaatgtgcttggcaagctgaacaccagtgtgggtccgaatgagcctctcttcttcctgagataacctgcatccacatgttttttctcctctagtgatcagcggctagaaggccaggaggtgggatctcagagaggctgagctggaagttaccactgatctggtgtctggaatctgggtatgttgtcctgggcttccagccatctggcccctacagagagtacttgagcctgcgatttggaattgatctcctggatatcaggctgtggcacagggtgtggtttccttgtgttcacagatggaaagtggaaaacaggaggccggccagacctctgctacatctttctttcaaaagcctgcctctcccactggacagttctccaggctgtattcctgcaactttcaggatctggggagggtctcagattcagtaaagcacaaacaagcacacagtttgtatacgatccccaccgtgccctactctaagtccacccaggcctgggcctctctcttcaacgtctgactgatgtggctgcctattggacagttcctgttggcttttcacaggcacctgcaacttcccaggtccagaactgagctttatttattgatttattgatgtattgagacagagtctcgctctgtcgccaggctggagtgcagtggcgcgatctcagctcactgcaacctccgcctcctgggttcaaccaaatctcctgcctcagcctcccgagtagctgggactataggcgtgtgccaccatgccccgctaatttttgtatttttagtagagatggggtttcactatgttggccaggatggtctcgatctcctgacctcttgatccgcgtgccttggcctcccaaagcgctgggatcacaggtgtgagccaccgcacccggcccacagcttctaaccatggttttccccatctctgtacacagaaaatccattctcatagtttttcaggccacaaccttggagtcattctcaactcttctttaccatccctcatcagttccatcagcacttgtatcagctctacctttgaaatatgaccagcacttactactttcctcactctggtctgaaccgctatcatctcatgcctggaccattgcaatagactcctcattgggctcatctcatgcgtggactgttgcagtagactccttactggacaccctgctctcattacacctattcagtctattcttctagaggggtcctatgaagacacaaatcagatgctcaatgtcctcctctgctcaatgtcctctattggtgtccatctcactcagaaagccaaaatcttcctcccattcaaaggctcatgccttgcacggtccatccaaccaccacctccctattaccgttcattcttcctgctgctcttgtgcacgctgctctggcctctttgcggctctgagcctgctgagaccgcatctgcctcagggccttagcacacaccgttccctctgcctggagtgctcttccccagggatcccccttgactggtttccttaccttctttgctcagatttccccttcccaatgagaccaccctatagaaaatcccagcgattcttttctccacctttctcctggttgatcgcccctcctggcttcccctcctggctttattctcctcctcactttctgctcttttatgtactatagattcgatgtgtcttgttaactcttgcattagaatgtaagctctgtttagtttgtttgctgttggatctcctttggcatacagtaggtgctcaggaaacacctgccgaatgaataagtctggtccacagtttgagcagctgcttcagagagcgccatgtgagggtgtcacgagcatctctctaactggactgcacaccagctacctgccttcttctggcactagcttctgaattttcctttggggaatctgctctatcccaatcccagtcctcatggttcaagtggggttggctccagtcctggctccaggaatgtgcacctgactccatctggccaaccactgtgttccattcccctgaatctggttgaccagaagtcccagacagtgtcagaccaaaaagactcaatttgggtactctcttctaggtgagagaagctctctttccacagggatggcttgcacctgtatggtgttcatgtgggtctagtgatgccaggaatgctgcctggagagctggcctgagagtaaagccaacttggaggaaagctgaggtcagggagatggagggacagaggccacccagagacaaagctcctagatccagccgcacctgaagctcaatgtatacttggacttattcatatgagtccaataaagtcccctttttgattcctcaatcctgctcgagttgggtttacatcactcgtaactgagagaatccaggctgacagagagtggttgtgacacacgcgtttttaacacccagtggaaggctggttcccatggcacttttgcaggccccaaaaccaccactcagttgcttttcaacagccatgatggtgcaactctgttcatcagcagaggcagtaatggcagaagaacccatgccaaacttgattgacaagtgtcactcaaattatggggtatgtaaccatgccaggctcacatacctggcagagtgggtgccagctcacctgcatgagcgtggacagcactcaccccactgtgtcagctgggaggagactctaatgttgctgttcagtgccatgagacatttagattttaatgtcgttttgatatgcaaagcttgctgtagacaaacaacactgtggcattggcccagggtgctctaacagaggatggctttaacaacccaagtgagagcaaactgtcacacatatgacaggtgccaggtattcctcacaagaatgccagggaaacagatcatcatctccactttatagatgagtaaactgaggcacagagagggcaaatctttcccaaggacacatggtcaatggtagagtgaggatttgaacctggtggctaatgagacagctcttacccttgcaactttactcggagtattttcatttaaagatgttctgataggctgggtgcagcggctcgcacctgcaattccagcactttgggaggccaatggggggcggattgtttgagctcaggagtttgcaaccagcctgagcaacatggcaaaagcccatctctaaaaaaaaaaaaaaaaaaccccaaaaactcccaaaattagctgagtgtgatggtgcgcacctgtagtcccagctacttcgggggctggggtaagaggattgcttaagctcaggaggtcgaggctgcagtgagtagtgatcacaccactgcattccatcctgggtgacagagcgagaccccgtctcaaaaaatataaacaaataaaaataaagatgttctgagaggcaaagaattcttttgaaatgcaaacatcaggccaggtgtggtggctcacgcctgcgatcccagcattttgggaggccgaggcggcggactgcttgaggtcaggagttcgaggccaacctggccaacatggcgaaaccctgaatctactaaaaatacaaaaattagctgggtgtggtagcgggcacctgtaattccagctacttgggaggctgaggcaggagaatcacgtgaacccaggaggcagaggttgcagtgagccgagattgcgccactgtactccagcctgggtgacagagtgagactctctcaaaaaaaaaaaaaaaaaaaaagaaagaaaagaaaagaaatgcaaacactggatgcagtctcgtggggcacacttcaaatccgacaatctgaggggcctcgaaaaggcacccatctctgcctggtgtgaacactcaggaaaatgagcactggggaatccgctctgatattctggggtttggagtctggctgtgtccttaaccctctgatacaagagccaccaccaagtggtccccatgtaagtgggacccccacatcaaaagcttgagaaagttcttctcttttctagtctctatcctgctgatgaggccaagaagaaagtcttggcaggtgctacttcacctttaatgccgcttctgaaactgcccgtcaccctcattacagtagagacacactggctttctgggaggcagcatcttgctgaaatttaaaaacacgacttggttttcactgtgtttggttttacagtgatcctttgccgaaggcaatgggtattggttttttcctttacagtcagaatttggaggttccttttaaaataatatttaagcttcaaaaataagtccagttaaagaaattctcaagtcatagatcagaactgggatgctgcaaaaattctcttgctccaggccagaaccatgtcttaatcctcttgctgtctcagagcctgctggagccccagaggctccccagaggtttagatcaaattaaatcagtaaaccctggcagagcccaaagattctactgcctccctgaacaaaggacgtctgcaaacgagacctttacctccatgtgcttccctcttattcttttggagcggaagtccagcaaaagtccgttggtctcagagggccattgagacacagggatgtccccaactactttaaacatgtaatgataatttaggccacttacgaactagtatggccctggaagcagttcccctgggcatttgataattccaaatgacagcttagggagtcaaatgcgtgcagggaaaggaaaattgaatatacgtggtacagccccgaaccccccaaccttgcaattaggaaacagaacaagcccctcgtcttgtgtatctggcaccagtcctcccaaccggaccctaatgaggatggacgtctgttctctgtcctgggactggaaagaatcctgggattatctcagtcaagaagtctccagcccagagggctgtcagaactgctgcacggatgggcagaaaatagcaaatgataaattttttaggaccacccgctgcatgccagttgtagcagagactgtgagataatgtattgggcttttttgggacatgcattattgatctgggtctgtctagtggtttataaaaagcctatcatgcccctcccacaaccaccttcccatcccttgcctccttcaaaacccagtgctgctggtggaagaggtctggcttgtttatagagggcaagacttgtaggccctaatctatgctgtgtagtgctattgggcaagagctgacacaggccactgaacaccaggggctctaaacccaccgcatccacctcctagaatttatccttcagaagcactcccttgtctgtgcaacgatgcctgtttaaatttccagcaacaatatccgtaacagtgaaaaactaacaaacgcacacgctaccaatctgaaaacaactcaatatccatcccaggaatctggctaaatagagcagtggctaagatcacgcgttctgggttcaaatcttgtttttctctttttttctaagatggggttttgttctattgcccaggctagagaacagtggtgtgacctaggctcactgcagccttgacctcttgggctcaagtgatcctccacctcagcctcccattagctgctactacaggtgtgtgccaccatccttggctgatttttacattttttgttaagacggggggggtctcactatgttgcccaggctggtctcgaactcctggcctcaagtgatcctcaggctcccaaaatgctgggattacaggcgtgagccactgcacccagctcaaatcatgtttaatcacattctagctgtgcaaacttggacaagtgacttctctctgcctcagtttttccatctgtcaaatggagagaagaaatctctgtattttaagtcagccacggctttctttgttcccctctctcctgtgtctacttcatacctgctattggtttccttgtatctgcatacgctgttggtttccttatatctgcatatgcctttgctttctttttatctgcatacactgttggttttattcacaagtcacagatgcaaaattcagtcagattcagacatgagacttagctggatcatgttgcaaaaatgtgttgttcctaagagtgggtattcagccactcacctgttgattcgggccccaaatctagcggctgcccttgaaacgtatcttttccataacccacatacctaacccattgatcagtttatttcccaaatatacatcaggtgggaccgcatctcagcacccgggtctgagcttccatcatcactgccctatcaccccatcggcctctgaatgagtgtcctgtttctgcccttacccctgcgatttaatttcatcaaaagagctgggggatcctgttagaacctaagtgaggtcacggccttcctcttcttaaggccccctcatccatgtctattttactaagaatcaaactcaaagcccccaccatggccacaaggcctggtgcaacccgggccaagtcagctcctcagcttcatctctctccatcacggccccagctccctccactccggctccctggcactttttttttttgctccaaaccaccgagcccatttctatctcagtatctttgaatttcctgttctcctcacctggaatgagcctcccttagttctctggctcctgacacagtgcactgaatgcaacaaatgcgtaataaacatctgctggatgaatgaacaaacgtgcagggcatcggaaattctaagcatgactatagccgaaacagcgtcggggctacacaatgtgagaccaagaagctctgaggtccaggtgctgcctgcaagacccctctgcaaaattcttcaagaaacgaaacacacctctctggccacagtctgcagactccccatagttatcaaatgcgcctcattctaaatgctgccaggagataggtatcctatgtgtcaaattgtcaataaaagctctgggctctgattgcttcctggctacaaattctttctgcactgagaagctcccggaggaaaaaaactatacttgtgatcattaatacaaagcattgcaaggaacaacttggttttatgtaaattgccttttcctggtagctaaaagacaaattcaggttgtcaaggctaacctagtcaaccttcacatttgttgccaccaacaacacgctgttatcctttaagagtggacagaggctgagggatcacccttcacgggatcaatgattgacagtctttgccacaacccacaagagcctccaaaatttggctccaggctcatgtctcatcttttttttttttttttgagacagagtctcactctgtcacccaggctggagtgtagtggcatgacctccactcactgcaacctccttctcctggattcaagtgattcttgtgccccagtctcctcagtagctggggttacaggtgtgcgccatcatgcctggctcatttctgtagttttagtaaagacggggtttcaccacgttggccaggctggtctcgaacccctgacttcaggtgatccacctgcctcggcctcccaacgtgctgggattacaagcatgagccatagcgcccagcctgttctctttaactctttggagaaatccaggaacggttgtgcaactggagaagggtagagacccctaaccttgaggacccagttgtgaccccaaacacgtgtgggtggcccgtgtcttggtttcaatgtactcaaaagtgagcacgacgcatcaacaccaccgccttgcctcaggagcctcagcctaacccagggaccctgctccgaggggccgaggtgccaccctggggccccgaggcttacccagctccacatcctggtcgtccgtcagcaccaggatgatgttggggcggatgttcctgcggtccctctgaaacctgcctttcaggcggtggtgcgacaggaaggccgagcttccacccagcagggagaacacagttgcggacagcaagcacagcacgaggctcggggggcccatcttctttttttgctgatctggtgcttcttttgggatgcgggagtctcaagttgcgtctgtggctttgtttcttttccctcgtccctcttcactcgcagatctagaggaggaggaagaatcaggtcaatatttatgtcaaggctgccggctgctcattcttgcataatgatttgtatggcggctggcatgaacaatgggagtttctttgaacaggggtggctatggcagagtgaaaaccgaactccgctgaagttagcaaagtctttacagtttgcttggtcaacagactggcagaaaagccttctgtggccacttctgcagaaacaatttcttccctggatccagtgagcctctgatgtgtcggtggcagcccaagacccgagtcagataacagccgtctctgaataatccacccaactccacagacaaatcgtccccagggagaggaacagcagcgggctggtctcaaggggtgaatatttgccgtcctcttgcatctgcccgcaccgtggggtacagaggtgagggagatgaagttccagctccccagcagcgggggattcaatcaggggtttaaacgagagcctggagctggatgttttgggctggacaactggcatgtgtgagtggcagatcttccactcactggctcagttttcccgtgagcaagcccgtttggaacctcggtttccccatgaacaaaatgagtagacagggctgttgtaagatttcagtctgctggggatgcgtgtgaaagccccttgttaagggatcttgtagttgggcaaaaaagtattcctttttttttttttttttttttcccagacagagttttgctcttgttgctcaggctggagtgcaatgacgccatctgggctcactgcgacctctgcctcctggtgttcaagcgattctcctgcctcagcctctagagaagctgggattacaggcgcctgccaccacgcccggctaattttttgtatttttggtagagatggggtttcaccatgttggccaggctggtcttgaactcctgaactcaggtgatccacctgccctggcctcccaaagtgctggggttataggtgtgagccactgtgcccagcctattagttttaagttgcagaataaatgaaatgacaatagagaaaattgagcgctaaaaggtggagggggaagacctgccacaggccactgtgccctcagtcacccccctggccccaggtcagactaggtcaccagcgaaggtgggtgcggggaggtggggacgcgactctggctcaagcaggtctctaatctcgccctgctctttgctctccgtggtcattttttcacttcttgaggaaatgagccttcaagtcctgtccagatatagacttttggtatcatttatttaaaacaagagagcatgagcgagagagccacagcctgcagatgtgccgggaggaagccaagtgctgtgggggtggctgtgttgctgtgaccttgaaagggtctgtttgtccttgcccttcatggggaaccccagccatcagctcaaagtcatgactcagaggctcagcaaggtctccgggttcagcagggggatgtgctgcctgcttcatctctcctggggactgcaaggtggcctgaggggtctcccgcctccctcttccctgcccccatcctccattttcccagggcagccggaggaatcttcctaaaatacagatcagatcacagcactgggcaggggagggcacagtgcctcgtgcaggtacagactgaagggggtgctcgctcccaggctgcacaagtgccaggcactcgcctcaccttagtgccagtcctgtgctcacctgccgcaccttccctggctgctcatggctcacaggataagatgcaaacttcttgccagggctgccctggcccgtgagatctggcccctgcccacttctcctcgacctctcctttccagccctactggcttctttctgtcgaatggacaagtcaagcttctctttgccccagggtctttgcacctgctcttttaaaaataactcccgcagctgtgcgcagtggctcacatctgtaattccagcactttggcaggctgaggcaggtggatcacctgaggtcaggagttcgagaccagcctgatcaacatggtgaaaccccatctctactaaaaatacgcaaattagctgggcatggtggcacatgcctgtaatcccagctactcgggaggctgaggcaggagaatcgcttgaacctgggaaatggaggttgcagtgagccgagatcatgtcattgcactccagcctgggtgacagagtgagactccgtctcaaaaacaacaacaacaacaacaaactcctgctttgtactcctggctctttctgtcaaaagaacaaacgtcatcacctcagagaggcctgccctggccaccctatttaaagcgggggcccccaacccaggcactctgcattttataaccggttttatttctcttgtaatcactactgcagcctgcaatttcttatttattgtccaattcttccccactagggggtcagctccctgaggacagagacaggcttatgttattcatggctgtctccaggccttggcacaaagaaatagataaataaaggaacggaggttctgctaaggtcctttgagttctgcagagtgagggaagctggacttggcagggccgtgccatagcttgggtctacatggctcagaggcgtccatcactgatgccttgccccagccaccctccatggacaccaacgaggagctggccactgtgttctctgggcagcgctatggttgaaaaaccccaggaagggtcactcctgctccatttctcccccagctctgcttggcaccctgggaggctgagctctacagatggcacggtcggcacgtccctgctctctggcttccggctgggaggctgcagcatgggaggtggtgggaagtccgtgcatttattctcctcccgcacgcagtagctccccaggcagtagccttcgtgtctgtgtgtgtggatgcagctcctgcctggggcccctcctggctctagcgtctccccagttctgagttcacctctccctcctcttgccccatcaagtctcgggaaagtaagggctcctgttgctaccggttcctcggtgcagcatcatttctttgctccctttgcccacctgcctctgaaaacagtgctttcaatcaactctcccagctgccctgatgcgcaccctaatttacttcattcagggacctgtatcctatgtcaggctggccaggacagcaagtctcccttctagcacctcccctgggagcaggaagcaggctccgctcaatgcctccttcccaggtggctctgagagtcacaatttcaggggagctggggacacactcgatgcagtcgtctgacatgagaactgtgagtttcatgggaccagagggtgaacaacaccttccttctcaatctctcgtctgcagaaacatacacctcatgacagccagagccactgcggcaactgcctgctgggcacctgctttatgccacgtggtgtgatggttaaggatgtggactttggagttacttgctgaaagaccctgagctagtaacttaacacctttgtgcctcagtttcctcatctgtgaaatgggtgtgcaggattaaatgtgttgatacagtgtgctgggactagagcctggccatagtactaactgggatacatattccacaatgtaaaccattattagagtgatcctaccgctgcagctgtcctgcgtcaggcactctgaaatctccttcaacctccaccaaggctccctcctgcaagtactattattagccccagagaaaactgaggtttcattactgtcctaaggccacccagacagaagatggcagggatgggatgtgaattctgccctccctcaccgttcaatgtgggcttctcatcacgaaactcggatttcccaactctttccgttcaaggaccacggccctgatttctgctgaatctgcagagcccttcagtgattatttgcttaacgtgcttctttaaatggcctcattttaaaataaaaacacaaacacatgttttgggaaaagaaaacttcctacccaaagataaatggaaagtggacatcgcttccctgtagagctaattgtacaaataaaagtcaaagaaagctgaatcagtggaacttgatgcaaatagcttcccaggcttcgcgtgccctcgcgctcgcactctcttttgaagtgagattagcaggtgttgaaaggagtcaaagcacattagcaccatctgagactttctgctggaggtaactggaggctgccagacagctgaaaaggagacaaactctagccatcgaatcagtccctgaaccaccccaaatcagagtaatcctcaaactatgttgtgtatctgatatggtttggctgtgtcctcacccaaatctcatcttgacttgtagcgcccataattcccacgtgttgtgggagggacctggtgggagataattgaatcatgggggtggttcccccatactgttctcatggtagtgaataagtctcatgagatctgacggttttataaagggtttccccttttgcttggttctcatcttcttttgtctgccatcacataagacgtgcctttcaccttccaccatgattgtaaggcctccccagccacatggaacaatgagtccattaaatctttttcttttaaattacccagtctcgggtatgtctttatcagcagcgtgaaaacagactaatacattatcagtggcccatgtccctccatcgggaaacactacgggatgctttgcacttgaaactacgattgcagcagccagcgttctaagatgcacattcacgttccttcagagagacagacgtggagtgctaatattgggagaattccgatggggtgccctacaaatagcaactctctgaaaccagaaaccaatcacaggaaaacctttctgaaagcttgcagcacactccagtctctgctctgagctgtttgcaggtgtcaacccaattaatatgcacacccacccatcaatatttcacccattttatggatgaagaagctgaggcacagagagttaaaatcactttcccccgatcatatgggtaagtggcagagaaggggttcaaacctagtctggcccgatttgggcagctcaaccaggaccccctagaagcagatctttgaacaagttcctaagagtctcccagcctcagtttcctcatttgccaggtggccaggtgccctctgagggcctttttggccctgggcctgtgatgccagggtacaggggggctgggaagggcagtcttcattgggagccctgggctgggtaaagatggagcccggggcacagtcagctggacttcgttcctggctcccatgttggtttcagagcaccccccactcctgggcggctatcacccgctctcctctggatggaagtcaaagctccggcaccagaagccagagaataacaggagctaattatttcatcagatcaagtcatcagtgggtcgatttctgatgaattcccctggctcagacttctcgtggcctcatgccagtttctctccggatgctgaagaaatcaattaaagatgacacaagggattctgccttgttttttttcctttttcttggtaaaatattcaaagtggctgaaccgagagagcacccagtgaactcacgcagcaccagccgcctgccactccatccctgctgtggacaacacctctccttcccaccagttcctttccaggtctctctggctcctcctctccatcctgagtcttctccaggaccttggcaaaggctcgccagcccaggagacatctctggaaacagctaacgtcctgagcatttagaaacatcatttttagttctcaatttctctgccgatctgccaagaggaacgggtctgagtgactgatgccctcaccttcccaatgccacaaaccacagcggtgaacaaacacctgggacctcatccagacctgtttagaaagacccagatgggctgttttcctctgaggatctccaaatccaacaagaggaggagagagaagtttgggaacaatcaggcagctgaggtggtgggagaggaagaaggggccagaggcagaaggaggcactggtcagatggtaaatgtccatgaaaggcgggaagaaagcaaactgtgggtgtgcagatacgtcccacgggctggggccagagccccgcaacagacctagcggcctccccaggtggtccagagaacctgatcatttctctctcttccttctttcactttacaaatacgtatgaaggacctcctatgaggcacagtgttcagtgataggagaatcctgcctggattccaacagcctcctaactggtttccctgcttctacctcgtcccttccatcaagcagccagacagatcctgttaaaacaaaagcaagggcctgccttcctccactgaacggccttcaataacttccatcccacgcagagtaaaacgcaaaaaccctccaaaggggctacaagaacccacccaacctgctccatcacctctccgaccttattgccttcccctctctcccttgcacacctggttccagccacacggtctctgtactgttccttgcacatgctagcacagcccaccccagggcccttgaacttgctgctccctctgcctggagccttcattcaggttatcttcaccatcccttcttccccctcctcaggtctttgctcaaatttcaccttggcaggttaaaaccgaaatctctgccctccccagtagcacttaccacctctcacagctagctcctttatttctttgcggatgtcctccagcagaatatcagccccctgaaggtacaggtttttgtcatttttgttcagatctatatcctcaacaattaaaacaatgcttgcggcatagcaggcattcaaaatatttactggcttaacaaagaattatctcctgtctcctggtaacagcccctgttagtgctttgaggccacaagtgctcttatttcccacccccccttatatatggtttgactgcagggcagcgcatgtgagccaggtggagccaatcagcaattccagctctagcttcagcgattggtcctggggcagacatgtgacccaagtctggccaataagcgagagggagtcctggaggctggaggagactgtgctgggtgccaggaggcatgaatatggtgctgatggtggccgcccattggatggagcccgagagagaggatgctggtgacaatggggtggaccaagttgcatcttgtagccaggtacagactcaaaaaagtgccctttgctgcttaagagagtccgaattagggctgtcatttgcaacagggagcacccagaccaacacaggaaacaccctagaagaacaataatgaatgatagctaacatcaggggccctgcacaattctaagcacttttagtgtgtgacctcacgccacccttacaaccaccttgtgagttgggatgctccatttacagacaaggaagataaggcacggacaggttccagaacctgcccagtgtcgtgcagcatgggtgctgaatactgtccctttggtcctcccttcccatcttctctccacctccaaatccaacaagaggaggagagagggctgggcgcggcagctcacgtctgtaatcccagcactttgggaggccaaggcgggcggatcacgaggtcaggagatcgagaccatcctgggtaacacggtgaaaccccgtctctactaaaaaaaatacaaaaaaattagctgggcgtggtggcgggcgcctgtagtcccagctacttgggaggctgaggcaggagaatagcgtgaactcagaggtggagcctgcagtgagccgagatcgagccactgtactccagcctgggtgacagagcgacactgccttaaaaaaaaacaaaacaaaacaaaaaaaaaaaaacaggagagagaagtttggtaataattaggcagttgaggtggtgggagaggaagaaggggccagaggcagaaggcggcattggtcagacgggaaacactcatgagaggagggaagaaaggaaattgtgggtgtgcagatatgtcccacgggctggggccagagcccagcaacagacctgagggcctcctcaggtggtccagggagcctgatcatttctctcttccttcatttactttacaaatatttattaagggcctgctatatgtgaggcagtgttcagtgataggagaatcctgcccgattacaacagtaatccactcttccctgtcccctgggaggttcacttggatgtgccacctccaagtgacagacaaaacaagcaagccagcatggctatttgcacacagacattctgaccccagagcctactcttttgacacttatgctgacttggaaagcaacaagtgatacaagggactgaggttaagtgtgttgtataaacagcaagaggaaaggggaaactgctggcctgggagcagtcagggagggcttcctggaggagtacttagcataaactgagcagcctaacaggagcaaagttctgaagaatccaaaggatttggatggccagtgaagaggagggtggaggacaggatgcttcaggcaggagaaacagtttgggcaaagagcaggcagaggaaacagagagaggcccctggagggatgggaaagtgtggtcccaaacctcacaagcccagaagctgtctagacaggggatgacacacgcacatctgttaaactttacactcccctgtgtctccctttcttcctggctacaggctttctccagccttctctcctcctctttggggccgtcaaagaaaggacagaagctcctgtaacctatgggccacagcttctccctgtctcccctacctagcccaggccatcttgtggctctccttgcctgttcttggaattccaaatggaggcagagaaccaagccggctctcaagaacagggcaggagacaatagaagggtcattcagagggaggagggaaagatcaggtttcaagacaaaggctcaggatctggaaaggaaattagggcataaagattgtagggcaaaaatgcagggcttaggaacccagttacctgcctaactattgatgtaacaagacattcctgaaggctcgtgtgtgccaggcacagttcttggcactgtggataaagcagtgaaaagaaagctccctgccctcctggaagtgatactctaagtcaacataggaaaagctggagttgaaagattccagctacatgtgagaatgatcagaaaagaggactggaaataatggcaaaccaccggcaagctgtgagaacagagtggccatggattaaagttagagcacaaaggaaatttagaaacaatgtattcaagtcttaggaagctgagcaccaaaatgttttgtatgtcaagtgggtagatgtttgacaggccatataattcacaccctcaaatacctgagcatctgccacttgctttgtactgtttcatgatcagtagaaaaaaaaaaaaagaacagacaaaactctcgattctcagagagctgacaaacagcggacagaggtaagcaaacagcctgatacttacttgggggaaaatgccacagggaacacgctgagtaggaggagggtaggatctagagctagcctgcctgggtttggatctcagctccgtcacttactagaggttgggcaagtgtctgaacctcttgtcttctcagtgacttcatctggaaagtgaggacacctacaagcacttgcctacagagtggatggtttaacatgcacggagactttcaacagatctgtatgcagcaagtgcccaataaatgctggcttgtgttctctgctaggtttgggccacccaggattatctcctttctataacagctcccaattttcttgggagtctgaggccgggtgtggcggcttacacctgtaatcccagcactttgggaggccaaggcaggtggatcatttgaggtccagagtttgagatcagcttagccaacatggtgaaaccccatctctactaaaactacaaaaattaggctgggcacagtggctcacgcctgttatcccagcactttgggaggctgcggcaggtggatcatgaggtcagatcgagaccatcctggttaatgcggtgaaaccccatctctactaaaaataaaaaattagctgggtgtggtggcacatgcctgtagtcctagctacttggaaggctgaggcaggagaatggcgtgaacccaggaggcagagcttgcagtgagccgagattgcgctactgcactccagcctgggtgacagagcaagaccgtgtctcaaaaacaacaaaaattagccaggtgtggtgacatgtgcctgtaatctcagttactcgggaggccaaggcaggagaattgagctgagatcacgccactgcactccagcctaggcgacagagcaagactctgtctcaaaaaaaaaaaaaaaatattgggggatccttttctccccacccttggtccacaaagttcaaattaggctccagttctggagctacaatgctagatcgtgggatcctagacctgggccaatcagagcctccccaccccttgcctcagtgacgggccagagtaatccaggccctttggcctgactggtcaggaagaggcatccagtctttacaactggctaactcactccatgtggttccaatgtgaggaccagggaagacagcgacgccactttgtcttgagtggggtcgggaatgaagccaacacaccgaacacagcagtgctgtgaaatgcaccatacttgggacttaacagcactggacacctgggatccagcccagcctgaaagaggaagatttgggttgggttctttgtttcaggcccaataaattcctctttaactagtttctgttttctttgtaggtcagtttccccatacttttgactcttcaagatcagaagtgaaattcccttttttcaattaggtcattcctagttgctctctcacttgcaaccaaatgaacccaaattggggggcgggctggaggcagagggctgactcccgtggcttcctggccacctcgtgcctgtgtgaacagaggcctcagggcacggcctaccagcccacgctaggcctccttggcctgtgcccaactctccgccttactgagggccaactcgcccatccttctttgacaactgataagagaaggtagtgtggaaaagcggaaggaacgtgggtgtgggaatcacaaattctggacctgactcggccaccctggctgtgacttgggccttccctggccctctgtccctgaagcaggccctgctcggtcacccccacccccagtcccagcactgctctcttcagagcacttatcataacttgtgattcctctatttactctctggcctgagtttgtgtttgtgtgcgtgtttttttttttttttttgagatggagtctcctctgacatccaggctggagtacagtggcatgaccttggctcactgcaacctccacctcccaggttcaagtgattctcctgcctcagcctcctgagtagctgggattacaggcacccgccaccatgcctgcctcattttttttttgagacggagtttcactctgtcgcccaggctggagtgcagtagcgtgatctcagctcactgcatacctccacctcctgggttcaagtgattctcctgcctccgcctcctgagtagctggaactacaggtgcccaccaccacgcccgctaatttttttgtatttttagtagagacgggctttcactgtgttagccagaatggtctcaatttcctgaccttgtgatccacccgcctcggcttcccaaagtgctgggactacaggcgtgagccaccgcgcccggccacacctgcctaatttttgtattttttttttttttttttagtagagacagggtttcaccatgttggccaggctggtctcaaactcctgacctcaagtgatctgcccaccttggcctcccaatgtgctgggattacaggcgtgaaccgctgcacctggcctgggtttttattttgtagaggggcatccctccaccagaagctcgcatgggcaggggctgtctcttggttgcctgacgccacggccccagctcctggcagagccgaggtgctaattcttccagataggcagccgagatttcctgagcacctactatgttcccggccctattcttcagtgctgggaatcaggaaaaacaatccttcatggatcagacaccaaaataaattacacaacatatgaggcaacgtgtcccaaggagatcaagtcctaaggagggaggttggagtgctagggagtgagggggtgtaactttaaataggttgggtagcgaaggcctgagagatgacagttgggtggatccctgcaggaggggagggaacatgccttgtggatatttaggggaagagcatcctaggcacagggaacagaaagcgcaactgtcctgaggtaggaagatgcctgagggagggccggaaagggggcacgcatggcggcacggagctgagtgaagggggctggggggttctagcttgcgggtgatgtgatctggtgtagtttttttttttttttttttttttttgagacagagtcctgctctgtcgcccaggctggagtgcagcggcacgaacatagctcactgcaacctccatttcccaggctcaggcaatcctcccacctcagcctcccaagcagctgggactgcaggtgaggacaaccatgcccgattactttttaaatttttggtagagatgaggtcttgctatgttgcccaggctggtgttgaactcctggactcaaacaatcctctcacctcagcctcccaaagagctgggattacaagcatgagccaccatgcccagccctgatgtaagttttaacagaatccttctgactatgtgaggggaacagactgcagggcatgagggtaggcacagggaggccactgagatgactaggtgggagcaaagaaggggcaagaggtggacggtttctgaatattgttcagtgaatgaatgaataactgcacggtgggaagactggaattggctgaatgctccagttactaatactgtgtaacaatttaccgcaaaacttagtggtgaattaaaatctttcttttattctcagaggctcctgatcaggaacttgcgcaggacatggcaggaagggctggtctctgctttgtaacgtctgaggccactgctgagaaggctcagcagggccttggcttgtctggcagttgttgctggcagtcggttgggagcttgggaggggctgcggagtgggcacctccatgtggcctcagtgtggcttgggcttcctcacagcatggcggccttgcagtggggtctgatttcttacacaacagcgagggtcccagtgatccagggggagctggctcatcttttctgctgtcccatggtgttccttccaccagggctacgcacgtctggccagattcaaggggaggggacacagacccacatctcaacaaaggagcatcaaggtcccaccatggatgagcctgcagggtaccgtgtggccatcccgtaaaacagtcagtcctgctgggtcacagaggctggccaggcctggggcagccacgtgggcctcccctgcagtacatcctccctcctaggaagtgaaacccgatctgatccctggctgtcggggctgggcgtttgtgctcacgtccatttcaaagaatctgtgagcctcggaaagtcctgggtgggcactcttccttctcacatgacccaagggtgttaaagccacgatgtcaggtccagggggttctgagcagggcaggagggtgaactgaagggctcgtaccaggagctagagtcacaacaacctctcctccttattctagataacacatctgctcagttctatgtacgccagaaacattgatttcttcccattttttaaccactcccagcttatttttaagtagaaaggaagccacctaacaaacccagaaaaccccacagaagaataagacctcgtttggggaaaaaggccccaacctcccccagctcttcccttctgcagaggcaagaaattttccaactcagcctctgcccttgagccctgtgctcaaagccgcccaacaacatggaggttgccctggagtccaggagggaaggctgctgtccctgggagcccctctcatcaggcaggtattggcttgtcagtggcaggatggggcgggggcgggggcagtgatgatgaggctctgcaggcttcaaatgggggtgctgggccagggctccggggccaagcttggaaggatgctcatcatgcctggctgggcaggagacctggaaacatctcccaacctgccggaactccgcctgggataacacagcttttccacctgggccagaatcaactgctgctagagttttttacaggcagctccccaggaagtttctggcaagatggcagcttccagggcaggggctcctgatttgaggcaaatggtacagcctgatctgctccgaaagggatgacagggctgatcgttaacctctgtgctccatcccatatgccagcgtctcagaataaataaatgaatttttaaaagtctggtataagtagaatacccaaatctgggcctaaattcattcattcattccctttcttatttcaataaatttatttagaaagaaaagtctatcttggaggaaccagcacccattgccataaacctgggtctctcaaccttggcattactgccgcgtgggcaggatcattcttcgatgggggactgtgctgtgtatcacagggtgttcacaggcctctgtccatgagatgcaagtagcacctaccccagttgtgacaatcaaaaatatctccagacactgccaaatgtccccctagggggcaaaactgcccctaggtgagaacccctgccatacttagatggcaacagtataaaggcaatgacattgtggttacattcttgcttgccaaggcctctgcgcttccccttacattgggagtaggtctccttgaagaccataaaggaggagttcacgcgattccctccttgatgacccagaggcttggaggagagcagaaaaggaaaaggggaaaaaggaaaagttaaaggtttttacgttggaaatggcatttccaatgtagtccaggccctaccccgtctcttatcctgaatctaggccacttcactcactcaggtctcctgcccgaccctcctcctgccatgacctgcttatgatgagatcaacgccacttacgccctgtgcgtggacggctaagatgaagactacaccttgatccagtcaatgggacctggttggtggaggccaccggtctggcacaagacttggcaatgcaagaagtctggatgttgtctggtgacctttggagagagatatgtttgcagtggcctttgtctaaagcagggacaaatatgcaaatgcatccaagggtcgggcaggagacctgagtgagtaaagtggcctagatttaggatagagatggggtggcgcctggactacaccggaaacaccatttccaaagtaaaaactttcaacctattttaagcactgagcgggctccataaagccccgctggagcttggcctgggagctatgtgcgactcttccaagctatccaatctttcctgagcacctactatgtgccacatgctaagaaacagcagtggccacaaggcaggccaggcctctgtcctcatggagctgtgataccttggtggaggagaaaatgaatgaatgaagattgtcttaagagctttggaggaagctgtcaggtgataggatggacagtaaattgggaaaggcctctctggcatgaggaggtggcataaggaaatggcatctgagctgagagcagaggcgggcgagaagccagttgtgggcaaaatgctttctatgaacggaggaagtaagtgcaaaggccctggggtgggaatgtgcacaatgaaaccaacatggtgcagccgagcacggcagtgtggcccacaggaggctggacacccctttgccccagcccatgccttctgggcaggccacacccgctgtcctttctggctgtttagaggaagtagaaatcagatacagaaattcccacctctgttctttgttcctttgtctcagctgtggacaaaagcttccctggcagggagttacaaagttatttctgcaaaaggcctttggccaaaagcaataaagtccgacttgaacagagtcattattcacgcctaactgtgggctggttctcagtgtagactgccacagtggggactgacaattccacctttttaaccccctcctccttttcagccccacattttcttagccctgcttacccccacagaacatgtatttatgtttccagagattgtcgtttccttccagaagaatataaaaggaataaaaggtattttgacggcttggtattaataatccaattacttctttccttttcacccaatccacaggcgagcgtgccgtcctcagccagcttgcccctgctattagcagatgagctgttcattagttcaccttggaaacagcccgacacttacaattattttagaagctgggggaaggagtcagaatcaacttttaccaaatcacctgctacatttggagatgcgagtggagtgcctttggaacgacaggtcggcttcccaatgtggcttgctgtgcaatctaattagcagccggaaatagaccggcaagtgggaggaaagcccgggtcagaggctctgcgagctgagattagtctggatcagtttttcctactagcagcctcccctgctgcggggactcactgggtgtcaccaggtgttggggtggaaggcagtgtcactggtgaggcggggtctgggaggagggagtgcaggcattgagcccaggtccctcattaccgcgcatgctctcctttcaggagccagaagcaaactgcccctatcttctggagggggatattgaggcatggcaggggttctaggagttgactttgccccgtaaagtggagagaagcttccagacccccagcagcacctgagctatggggccctggagctggagaagctgccacacaggtttgggcattctacttatactggactttcaaagtccattcactcgttttaaaatgttcattgctctgccaggggtggagtcacctatgcaggggcggtgcagagatttctaacaatttttgtccatctggtccccttcttttgacagcaccccagcttccttttgaggactccctcccctctgccaagatgcccccatcctctctgccaaggggtgatcatgtgaccaaggtcaatcagactttcttaccatgtccccaactgtcaaataaagtgtcaagggcagaaagaaaaagcaggggtgcatttgtcgcattgggatggaaactctccttcaggaggctgctagtaactcctgcgccaaggtccccagaatttcctcagttcctgacctgtcctttcctgagccccccagtaaatcctgttccagcttgaggtagtaagtgttgggctctgctacttgcagtctgtgatgaatgggtactttggtggactccaaaaagccacactgcctggtattcaaacccttgtgtgggccccacctcatgaaaccgggctggctttgggacctgttttgaccaagagaaggtggcagaagtgatgctgtgccggttttgcggttaagccttaagagaccgtggcagctttcatttttgcactcttagaagtcaggctaccctgaacctgccatactgcgaggaagcccaagtagccatagggcagagcccacatggagaataactgagctcccatctggtgaccagcaagagctgccagccatttgaatggggttgttttagacctgccagctgatatcacatgaagctgaagaaccacctggtcaaaccacagaatcgtccaaaataaaatgttgttaccttaaaccactgagtttggagtggtttgttatacagcagaaacacaacccaagaatcctcagtgacactgatcagagcccattcccccaacagaaatgtcacaaatgactatgaggttaagactttcagcctcttcggctaatgaacacttggaggagaacatcattcattcattcctttagtcattcattcaaacagccagtaagcctagcacagatggtacaaagatgaacaagcttcaggacctcctgttctagtgagggcatcacacacagtgcctcagtttccttactgataaagtgaagatgatattagtccctgcttcaaaggcttgctgtgatgatgaaatgctgggcaaaaagtaatcaatagatattagacattattattactacacacttgcaatgcacaatgtaagtgtccagggacacttgcaatgtccctggaagtgtagccattgggtacaaagtgtcacaacgggagacaaactcaaatgcctacgtgggccaggcagataatgtaaacgggtgaagtggacgcataagaaaactccacaccccacttcctctccagctctcatctggccacttttggtagagatggaacagagaaatattgctccacaatgagaaaaacagaagggaaagtgcaatgaaaagccaaatgaattggttcacaatgtcaggctataggggatggtggggaccacatctccccatttttcaggagaagctgaaaatccagatttttaaaatgtgaaatctcgtagttgttacaaatctgacagctttttagaaggttcaaacaaaacatttctgcgagctgaacagagcccctggttaggtggcctgtgatgtcctattctaccagcatggcagagcaaggagagacttcgttgtgtctctttcctcctttgtaaaacggggttggaagatccccacatcgctgagttattccacattcacaggagcgcgcacttaaaccaccactagcctgtacaaagtgctcggtaaatgtgagctttcaggagggtaggttggggagtggaggttaaagaggctgctctcctgggctgtgaccgctgttctttcaggaagggacaatttagggaagggagttgtcttttcaagggcacatgcagaaatatttaacccaagagccctcattagaatgtcacaccactgacctggaagactagcttggccccagagtcatcagaagtggagggttccaccagcccttctgcaaggccgtgaggtccctgccgtggcataaaggggacgatccttcctctgcaagcaatgctagcacaaaaccccagctctggcactggggagcaagtgagtgtgtatgaaaccaatcctcccagccacctgcttagctttttgcaaatgactaacaggttttgacatccttgccctgagcagtcaccttcgagcaaacatgctagccagatgtgcctgtagctctccaagcctctttcttttcttgcttccttcattcaaaaaaaaatttactgagtatccaaagagtgccaccctggttctcagtgctggggatacagcgatgaacaagacagacaatgtccctacaagcacagagcttgctttttagtgaggagagagaagacaaaggacaaataagcaaaccaggctaattccagagagtgataagtgttataaaacataaaacaggttgtccttccagcattctagggaggtgacatttcagctgagatccgaagcataggaaggagccaggtcctttcccagtgtttgatttagaggtgagtgcaaaacccaactccggaccaatgaaacagaaagcaaagtctgctagggtgggagtgttctggcaaggattttactctctgattaaaagagagacagcaaggagtcctgtcctatagtcccactttgtagggtgatgcgacgtctggagctgtggcagccatattgagactatgaggcaacaaggccaaagacatgatgaggacagaagaagaggcttgaaagatcctgggaccttggatgacactgttgtactgaaaaaccagcgcctggactcccctgctttggacttggtgttatgtgagaattaaatgtttctattgcataagccactgtcagtcagaaatgtgattcctcataatgaaaccatttcaattcacattaaaatgatcaggactctaagctactaagaattatagtaggctttcctggtctctgaaatatccagataagtggcctgcaatcagaagtctatggatagtatctgtctcgagagcagaccagaaatgtggctttcagatggtctgattttcaccaagcaggaacatctccaaggcttctgtgagctaacagttttttcaatctcttttcaaaaagttccaggccaggcagggtggctcacgcctgtaatcccagcacttttggagggtcacttgagcccaggagtttgagaccagcttgggcaacatagcaagatctcatctctaccaaaaaaaaaaaaaaaaaattagctgggtatggtggcctgtgcctatagtcccacctacttgggaggctgaggtgggagaatcacttgagcttgggaggttgaggtggtagtgaactgagactgtgccactgcactccagcctggatgacagtgcaagaccctgtctcaaaaacaaaaaagctcctcttctctggctactggggtgggtcaagtcacccgctggggtcctgaccatgagccaataagaaaagctattggccacattcttcccctaacacatctggcttccacatggccaaacacatctttggtactatttgtggtccctggggatggccctgtccaccaacttacacacacaagacctggccataacaactctgagtttgggatagaatttatctaagattcaagctgggcccaggtgtgcagagcagtgggccaggccttctgtaagatgacgctccatggcagaggccagggccactgggcaacgtgtgctttggaatcacattaagagaacgtggggaattcaaaacattctggttacagagaattccaagaagccctggcctgggctggaggagaagctctgaaggccatgccaacagctgttccacccagaaggcatcgtgctgcctacaaggcccgagatcccacatgaccttaagcaatttcccaagggcatctgtggcagagcaatgaatatttagctctgtctgttaatcactgagaaaccaggcgatgaagaaggggaggctcagcccgagccttcaggaacttcttggaaatgtcagagaggtgagcatgtgggatatgctaaaaatattcatcaaatagattcatgacaggcactagggggaggctggggggagaaaaccacactagaaaacaaaacacattctctctggataattgtgtccagtcccacagcttaaaataacatcaatatgccgataactcccaaacttaggttgccagccccgaccggctgcagacatccacgttcaccacccactgagctttcagacatccaggtggggttcatctcaaacccaacatttccacgtcggaattccagatcactcctcctccccaaaaccttctctcctatcttccctatttagcaatcaccacgcaccaggctgcctagtcacctttgactccttggcaggatacatcatgaatatttgggctgaatcatttttcactgtggggtcatcccgtacattgcaggttaagcagcatccctggcctctaccctctagatgccagtagcaacccttccccagttgggacaacctatactgtctccggatagtgttaaaatgttttctgggtgtcaaaatcaccctcggttgagaatcaaagccctttccctcactctgtaatccaatccactaggaagtcctgtgggccctacctccaaaatacatctccaatccccatttcactccatctccattgataccaccacggtccaagccactctcgggccctctctgttgcctaacagtcccggtgataccacttccatctgcacagcacgcctctcacaggagccagcaggatcttcttgaaacacaaatcatatcattctctgacttaaaaccctccaatggttctccattttattttttaatttatttttgagatggagtcttgctctgtcactcaggctagagtgcaatggcacaatctcagctcactgcaacctccacctcctgggttcaaacgattctcctgctgcagcctcccgagtaactgggattacaggtgtgcgccaccgtgcctggctaatttttgtatttttagtagagatggggtttcaccatgttggccaggctagtcttgaactcctgacctcaggtgatccacccgccttggcctcccaaagtgttgcgattacaggcataagccaccgcgtccagacagttatccattttatttaaaataaagtctaaaatttcttagcatggcctgtatttctcatctctgacgtgccctcccccacttactcctgaccctctaccctagttgactttttttttttttttttttgagacagagtctgactctgttgcccaggctggaatgcagaagtgtgatcccggctcacagcaacccctgcctcccgggttcaagtgattctcctgtctcagcctcccaaatagctgggactacaggcacgtgccaccacacctggctaatgtttgtatttttagcagagatgaggtttcaccgtgttggtcaggctggtcttgaactcctgacctccagtgatctaactgcctcagcctcccaaagtgctgagatttcaggcgtgagccaccacgcctggcctaccccacttgacttctatttgtgtttggggcaggtgtcttggacaggcccctcccaccgcctctgggcctttgcactagctgttccttctacctggcatgctcttcccccagatctttccaaggcggactccttcctaaaatctaggtcacagttcaaaggtcacatcctcacagaggcctccctgacagcctgcctaaagttgcctcccaccccatcacatcatgcagtcatttttcttttaaatttttttttgagactgagtctcactttgttgcccaggctggagtgcagtagtgcgatctcagctcactgcaacctccgactcctgggttcaagcgattctggtgcctcagcctcctgtgtagctggaattacaggcaagcaccatcacacctggctaatttttgtatttttagtagagagagggttttgccatgttggccaggctggtctcaaactcctgacctcaagggatcctcccacctcggcctctcaaagtgctgggattataggcatgagccagcacgccaggcctagagcattttccccgccttctgacagcccctgcattaggcaggaagacaaagaggcccacgctccagagctctcttcgccaaaccctcctgctgatatagaatatacacatgacatattggtcatgccccccagcatccaggaccctccctagaagtttgattcaacaggatctggtctttgcctttttaaacaaatacagccagatgattctcatggtgggaggttagacaaacactgcccctggccccccgaaagcacaggatcaaggccaggccccatccttcagacagtaaggcagaaaagtcaggcctttgatgcctcctggccctggtggaagggagaggcattgcccaggcagcgtgtttccccagtctccaccttggccaaaatgaagatgggtccatctggccagcattgctcacattagtggcccatcatcgcaggcactggccatctgcctctccagcaaccgggcttccctttcactggggactccccgtgctgttttattccaggctttggggtctcagcagtcagcctccatccagctccagggagaggcctgtgagcctggcttaagccaattgttggcaactcatttccttagccagtgactggtttggacaaaaaacagtccaatcagagggaaccatggggctcaggtgtgcattgccagatcagaggcttgttctttccttttgggcttaaaccagaggggatgagacccctctgctccatgacatctgtcctgacacctaagttatggtaacagtcaatgcctactgaaggctcacctgggtcagacgccctgctaagcacttgacattgatcatctcatttcatgcttaccacaagcaggagacaggtgctatgatcatcatcatttgttggatgtgaacatcaaggcacagaaaggttaagtagcatgccccagatcccactgctgggcagggagccaggcagtctggctctcctagccacggtgcccacagctgccagggactgcccgccccagagctggagagacatcagcctcatggaaggcagaggagcggtggataggaatggattctcattacaaaatctgagctgtgggtccagctgtgtctgaagctagagttagtcaccttaagacttttggttatgaaaaccagtaagtccacttcttttctccttaagctggcttgagtttttttcttctctttttccgttgcttgcaagagaaaggaacctgattactttacagttcttctaggcaagtacccctaactgatactccatttgcaacttgcacacagcagctgctcagtaaacaccagcagatacggatggactgctctcccttccggtccattcactgctggatctgtaccctgacacccaactgtggccagcccagcgcttcttcccctttaggctccaagtgaggcctcgttccctagcaaccaccccaattaggcaaccatgccatttatcgggatgccaattaattataacgatcttaatgccctcccaattagacagtgccttcaatccggctgggccagggctgtctgtagatctccaccaaggcccattccaaggaggcccagagaaagcaggtttcagggagggccccctcacctgcagatcagcattgagagaggcccccatcttccacatccgcccaggcctgacacagagcaccctggcaccacccccagggccaggccatcgagactccatcaccaaccacaggaaggtctcacctctaggagagcttttgctctctggccactgtgctctgagtgggctgaaatcttcaccatggttcacctggcttttccatcagctgcatttgatgtttccctttgcattttgactgggggaggggacagtgtgtctgctcataagcagaagaaaaagcaccaggcagacacatgttttccttggggcaaaaaacctcaaatacaaacccggactctctgtcggaacagtgggggtttatggaaagttaagggccttttactttgcaaagtttgactgtctgaaggtgttttcttcccctgcatatgtgtttcttctacatctgggacaaaggccaaggtcatggaggagagtccagtggttccaagtggaccccggagcttgagggcctcttgaatcccagctctacctgtgaccagctgtaggcaagtcacaatcctctctgtgcctgtttcctcatctttaatatggcaacaatggcagtacttacttaacagggtatttgtgtggatttaatgagtaaggtataagggcttagatcaatgcctcagatcaggcccatacaaaactacttaagtgttaccaattatcttaagtctggactaaaccttttcttttaactacaagctggtcagaaatgctgatatttttctgtaggacagggcttctggactccttctgcaggactaaagtctaaggtcagataatggccaaagcttgacagagttgggtgatattctgcctggttaacccagctgccctcttgaggcaggtccaagcagataaactaaccagtgccagaaaaagtgagaaggaaatgttatctcccaaatcaggtccaaatcaggtgtgaaactgcatatcaactgggttctttggacagcagctgaactgggggacatgcacgtgcatgcacacacactgctatgctgtcctcctccaagaccagacttttacagtcaactcatcactctactctcaagtttgaaaatttaacatgttattagggtttcagaaaaagccataaattcaaataaaaaacccaagaagtacacacaaagcccaaaccccaaacccacattgaccctcagctgcagcagtgatgccaacatcacggcctttatgtatataaatttagctggggaaggaagaggccttcatgtacaaaggtccaacatgccatctgccaagcccaccaccttcgcctttcaagctgcttattagaacgctaaattacacatccgacaggctgtctggatgagttttctcttctctatgatgtgggagagacgaagctggggagaacatctcttacagggaaggggcccccttcgttctgtcctccctaccccgttcctatacttaacgattggctctaatttaattagaaccctctggtggttctgtaatgggaggcagaggctgtcaagaaatcaccttcactattcactacaagctgaaatttggagagcgcgcagatccgggggtgtcctccagagaaagcccgtctctcctgctccctgtctccccctgagaacctgctccagcgcagcctccccttctctgccccaaaagtgggggtggacccggtgggaaacaggcaggggacagatggaggggcgagagggcgggtgtcccaacacgcacagatgagcaaatacccagattgaaacgtaagctgaatgtaattacttggttaattaaatattgacttttaactcaaaaagtgattaaaacaagctgcaggaagactttccagaaaggggggcagggaatgaatcaaagctttcaagggggaggaggaggaggagagggtcgtcacaggcaggtctggcttgctcttcctactgtgtgctgggcctactgcgtgcaggtgggggagttgcggaccgaggccagtgtgcaaactaggattgcaggcttccctttccatcttccaccccgagacggcatctctctaccctgctgccctcccagtgaaccggcagcttctggcgcgcaggagccagatcctgttcagccgcgtttccctggaacagaacgcggtgcccggcacgagggggtgctccagaaatgcttgtagaacgaatgaacgaactactataaggaatgtttggaaaagtgcactcctagaattcaccgctagacttctgaaaccccgaggagccggggaggggagcatccctccgccaggcgatggaaactcgttctgccctggcctgggaggaagtctgccttttcgatcctgtttgtcctttcggtgtctgcgagtttccaaccactctgaagatccggcccactgcttccccgagtcctgcccggacaagccccacgtgggctggcatctaccggtcccttgggtctaaaccctaagggtcaacaaggccatgcccctgcggatggccggcccaggcgcgctcccctacccggggccgcctgtgctcggtgtgccgtgtccgcgggtcaggggcgcggcgggaagtcctcgcccgcccgccagccagcggggtcaaacaggtcatccctctgcggacggccggcgccggagcctccctcccgcccgcccggacccacctccgcaagcagcgctggggctggagccgggcggtccggaccagccccggctcacctgggcggcgctcgcggccgggctcacgccggggaaggctccggccgccgcgagcccccgcccgagccccgcgtcccccagccacccacctgccccccacgccccactcaccagcgcgcacggccccggcaacctcacccggagcggggcgccgccgccgcctctgccgcagcccggccgggccgctgggcgcaggggactccgcgccgccgctgccgctgccgccgccgccgccgccgctgccgctgctgcatcccccggcgagcgctgctgctcctcctcctgcctcctccccgccccccaacgccgccgccaccgcccccggccccctccccgcgcgccgccccagccaaagtccggctccgcaccccgcccggaccgctcttaaatcgccccagcccggccggccacgctgccccagccagccccttggcacggcgctaccgccccccgctcgcctgcccgccggcctccacgcaggggaggcgggcgcgctccggggcggggagcgtcgggccgggagccgcggacggctggggcccggggcgcggggggcccagccgcggtgccctcctcgagccctccgcgcgctagcgcttttacctccggcctgggggacgcgcggcccgcgacccggccctgcctgtccccggcgcacggccccggccccggccccgaagtccagctccggacggggcagtgaacgcagagctggggtcccggcggctctcgacctcccgatgcctccggactcggctggccgcgctcccggcgccgagcgcgcaccctcgccgggacacacagacgcacactcactcgacacactctcgctcctgctcgccctcggcggagagttgaaacagatgtgggattcgcccaggagctggaaacgagggagggaagcgagccagagccttgtgtgcacgtgtgtgtgcgtaacacacaaaccagggggcatcgctaataaatcaaatatcgtgataaattcaggagggccatcgatcaggtccacttggctggaaacgacgtgaatctgcctcttttccgctttcttcttctcctctctcggagctggagggagccaaatgttccgcggggagtgcgacagccccggccgggcgctcccctcgtaatgacacgttaataaatgttttcttttatctgctttcacaggactcgccccggtctgcaaacactcgactgcctttgccgaaagcctcgcgctcgcctccagccacacacatttgccattggagaggccggcgccggccgcgacccgcagctcaatcgcagggcaaaccgagctgcctgtgcgcgcccgagaactccccgagaaattaacttcggctcaagtgaaaatagcagctgttgtccagaaatggcccgggagtagcatagaaaggagaaaccggcttcctccgaaaggggaggaattggactcaagggggtgctgtctaccgtggtttccgctgtccctcgcgccacagaagaggccggagggggaccggcctgacgcgggtgggcaaagagcgggcagagaactcaccagcagctgcagaaaacacagccgagttgctagctaaggggaaacagacgccgctgtgggaaagcacttgtaaacagcagtaacttattaaatcttgtgacaatctcacacagtaagttactatgcccgttttaccatggaaaccaagagaggtttagtaactgtccgaagatcacacagttataagtggtggatcctgtgaagccaagaagccttagctcccggctcatgctcttaaatcctaggatgtttttacttttcaacctagcatctcctttctctgatatgatcctccatggtagagttgtcagacttaacaaataaatatagacatccacggggaggaagttagtactaaaaaatcattcatttttaaatctgaaattcaaatcggatctcctgactgggtttggagctctaggctcctccccataacctctgttagccacgccaatcaagttagagcctaaataaatcagaaaaaccttgcacttgcttttccaagtcaggtgctggccctacctttggcatcactgataaggctgaacagctcccaccttctttgccctgggacagaatgtcaggcttcaccatcatagaccgaaaaataatggagacccctctccttccgcctcatctctgcagaaggacatatatatcatttagaattttctagtagtggcattagaaagtaaaaagaaacaggtgagggccgggcacagtggctcacgcctgtaatcccagcagtatggaaggccgaggtgggcggatcacttgagttcaggagttccagaccagcatgggcaacatggtgaaactccatctttacaagaaatacaaaaattaggctgggcatagtggcatgtgcctgtggtcccagctactcgggaggctcatgtgggaggatcactttgagcctgggaggtgaaggctgcagtgagccatgattgttccactgtactccagcctgggtgacagtcagaccctgtctgaaaaaagcaggtgaaattaattttaatattaataatatagtttacttaacctagtatatccaaaatcgatctcttcaacatgtaatcaatataaaattaatgagatatttttacattattttttcttactaagttttgtaatctggtgtacattctaaacttacagcacatctcaattgggaccagccacatgtggctcaggggtcccatgctggacagtgcaactctggcaggttctgcggtcaatggctgtttccaccgggtcatttcatgtaatcctcctgacaatctttcaagcaaactgatgctcagagagataaagggtcttgcctatagtcaaaaacttggccagtgggatttcaacccttttgatgctgtccctggtttggggacatgtaccccactgcagaagcaattttcttactgaatcctcagggccccttggtggtgcttctggggcctggggtggtggagggaggcccaggaatgggatctgcctccctcctactttttatgttgggttctggagaatatttcaggggtggggaaatttccacggcaaaaaaagtctaaaaaaaaccccactgcattaccacactgtgcccttaggtcctcgagttcctgaacatggctctcccatacccataaggatcctgcccacaatgtttcactccatccttctctgctcgtcaggtaaccccagtcagagaggggatgcttacaatcccttcttctggggctgtgggcctggcggacacgtggcatttgcttatctttttggatatgttgtttccattgttgctggacattaccaaacatggtaacgtctatgttggccccttatccttccttaagtagacggggacagatcttgtgtgtgcatgcatgtgtacctgtgtgtccgagcatgtatgtgtgtgttcattgtaggcaggtgctatgggtcatgcgttttagtctggacttactggctcagacacccatgaggtcagagggtctgcaaagctcctctggccgtgtttcttccccataattcccagcaaactccctggtcctctgggttcaaggcctcagcctgttttccaggtccttccaggccggtggggaccgcaggccccgttacggagcttggagctcagtgtctgcctgggatacatgaggggccccgagggctcacatgtcccccagcctgggaagtcactcagccgggcctcggtggggctcagcagaatcctgggcacccccacggcctcctgatactccagcccctgccgcctccacccacacggagacagcttttctcctcccacatccctcatcccccatgacatctcttggtatgatcctgaccatcctagctggacaatcaagcttttcaagctcctcatgccgccccattctccccagcattgttgatttaacctcagggggacctttctcttgacgcctccatgcctcgtttcttccctctgcagattctttggcagcccttttgtgcagaacagccatccggttctatctcccttgcaaggccggagttgctgttttattcccttgactcatatataacaataaaaaaaatcattcttgctatgtgtttctttatctccatcaagtggttgaaactcaatctgattgtccgagcacttctggctggatttgggttggagtcgatgggattttatgagggttgtaaaagtcaagcttttaacatgtctcaaacaaattggcgtgtaaaggagaaacgttagaagaaggaacatggctgcagacgggaggcttgggaatgctagccgtagtactggggcacaggtggctttaataatgcacacaagtttggctgtaagttgcttctacaagagcagaagaggctgcagaaccactctcaggaggttgagatcaaacttctcggctcctgagtgcacacagttttgcatggcttttaaaatacagattccaggatcatccataacaatataaacctgtggttaattctgctgaattttcatttagacccaagctgtgttgtcagtagaaatgcaattgcgttagagaaaaactgtttatatttcttgagatactgtgataatgaaaaacagtaccataaacccccattaagtaagaagaacattaattgtatttcatgctgcctccctgggccagcacgctgacacagacatgctttacttcagcaaaacacggctaatctttgcagcacggtacccattttcccctttaattatacataattgtatagtctaatttattctaacgcctgacgccgaaaagtgcacatttatgaatcaagggttagtttgggagggaggagaattataaacgggtataattgcagtctcctgggggctgcttatgagtgatttcaaagaatgatgatgtttattctgaattcttaccagtgaaagacagtagggctgcctccagttaagatactgttctaagaacgcagataacaggacaatttgtctagttgcttaccacactagtggttttcctttggataagcaggcaagaaagattaaagatgtgggttccacatattttgtgatgtgatgaaatccaggcacacagacagcatcagcaaatgtgcaattgaatattaaaatgagtaatgtggccccaggcagcacagctgcagatctctgtggacaagggagagtgcttggaactctgttggatgatagttttctcagggggaaaagcaggatccatttgaccattagtgcaattcactttagggctctctctggaacagtgcatctagttttgcaatcgtatttcagaaaaatcacctttaagctttgatcataattaattaatcaattatgatgaatgttgatggtgatttagtaaaagtggaatgatgacttagggcccccccagggctgaggtttctaacgaacctaggctctgcctccactgtctggcccctccttggctgatcttcccgggcctcagtttcatcttaagaatgaggataatatcgaggacattgctggctgtcatgtggattaagtgagattgataaaggtaaaacgcacacacaacgcctggctggaaggtacacaatgagtgttcactaaatcagaattggaaacatgctgtcttgtgctcctgagagagatactccttcatggtctgcaaagccagactttgaaatccagggcagttgaggcaatgatgccaaaggaaaccagatcacgccactcttcagcctaaaatctcctcctcttagatggagacgcgatcctgctcctgcctggcactccaacatctttcgctgctgtcttgcttccatttttattatgacaatttcacatggaaaagttgaaagaatagtacagtggacacacttatactctccacctagaatcaacagttgctaatattttgccatgtgtgctttataagttgcagaaacatttgagaggtggttgcagacatgatgacacattacccctcaggacttgggcaggcatctcctaagaatcagttgttttcccaggtgacctccctattattatcacaccaaaggaaaggaacagtaattccgtaatcactcccttgctcacagagacacaaaggtatctttcactttgttcctcaagccttttcctgcctcagggcctttgcactttctgtggcctctccctggcatctctctccccagattgtgctccaaaaactctttctcattacttgggtttcagcataatgtcaccccttgggagagtttgtccctgtctgtttcacctaaaaatgcttcccaatcactctatcctccctccccattttagcgtcttcctatgacataccactatctgaaattctggttttattttctgtctgtgactgcggtctatgtccccctccccactccccacccacactacctgcaggagagcaggggccgtggccatttgttcactgttgtagctgcagtgcccagaacactgtcttgcatggagtagacactcgacagatatttgttaaatgaaggaatgaatatcccatatgtgatgttttcaaacagaagaggtggtaaaatggagggactggaccctagtttttagagataaatccacacagcttcaatcccagtgctaccacgcaccaactgtgtgttactgtgggcctgtgttccttaaactcacctgccaaatagggacaatgacaatcatctctccaccttctaggactgttgcgagttattaatgagcttatataccaagagcgtagaacagaatctggcatctaacgccaacctttcataagcacttacgattaatgttgaataggctggccagaggcccatgattttaagcaccactggctgttcacaggctcacacagaaactgtctccaagcacaatgcccctgggagaacttcttggaagtgctgatgctgccctgtgtgagaccagctaggtcaacatttgcctggaaaaagctctggttgtttacagcaggcatctgggctgatgagtcagggcctgtggttagacattttgattctcacccctgagaccagcccttggaagctcacacaggagccgaggcagggaacctggagagaagaggacaaacagagacttccctctgctaaatgagagtgaatccgctggcaaaggtctgactctgcggattccctcccactccactctggtaggtagactctgttgtgaattttaccttattactggcctgtactttttttttctttttggcaaggtcttgctctgttgcccgggctggagtgtagtggtgcaatcatggctcactgcagcctcgaccttctgggctcagatgatcctctcacgtcagcctcctgagtttctgggaccacaggtgcatgccaccacgcctggctatttttttgatttttttgtagagatgaggtctcactacgttgcccaggctggtctcgaactcctgggctcaagcagtccttctgccttggcctcccaaagtactgggattataggcatgagccaccatacccagcagcctgtacatttttaaaaagagaatatttggtactggatgtccatatgcaggggcatgtaggtaaagatgcttttcagctaaagctgcaataaaaaaaaaatgagttaggactgggcgtggtggctcacgcctataatcccagcactttgggaggccgaggtgggcagattgtctggggtcaggagttcaagaccagcttggccaacatggccaacatgatgaaaccccatctctactaaaaatacaaaattagctgggtgtggtggcacatgcctgtggtcccaggtactcgggaagctgaggcacgagaattgcttgaacccgggagtcagaggttgcagtgagctgagatcgcaccactacactccagttaggaaactaacagaagtcttggaaattttgacgataaaaattgcatttaactggaaataaataaggtagtctacccaggaaagtgtgtatgtaatataggtaatgggatgaccggctttaatgcagttgactcagctagcatttctactgtactgggtggaacggtgtccccccgccccaattcatgccaatccagaaactcagaatgtgaccttatgtggaattggggaccttgcagctgcagatagttaagatgagggtgtaatacttagattagggtggaccctaatccaatgattggtatccttctaagaagagaaagtgggggccaggcatggtcgctcatgcctgtaaacccaacacttgggagaccaagatgggtggatcacttgaggtcaggagtttgagaccagcctggccaacatggtgaaatcccacctctattaaaaatataaaaagtagctgggcttggtggtgtgcacctgtaatcccagctactagggaggctgaggcaggagaatcacttgaatccaggaggcagagattgcagtgagccaagattgcgccattgcactccagcttgggtgacagaacgggactctctcacaaaaaaaaaaaaaaaaaaaaaagagacagagagagtggggacgtagagatacagggaagaagttcatgtgaaggaggagacagagatcagagtgatgcttctggcagccaccagcagctggaaagaccctccctggagcctttggaggagtgtggccctgctggcaccttgattttggacttctggcctccggaactatgagagagtcaattactgctgttctgagtcacccagttcatggttattgttataactgctctaggaaatggatatgcccatcaatgagttggggcggcggggggggcggggggtcactcctcttctcccagggtgaatgagtgatggtgacagtggaaagagatgtccccacggtgacaccagagcaggaatctcagcccaggccccaaatcagagattctgatttaatggttcagtgatagatccaggcctgggtatttttttttttaaaaacaagtttattgaggtataatttgcataccataaaattcacccatcttaagtgtaccattgaatgatttttaaatgtcccaagttgtgcaaccattactgtcatctggttttggaacattttcagcatcccagttccatcccttacgggcatgggtggttttcaaagctgcctaggtggctccagcctgcgccagggctgagaactcccgctccctggggagtcctgggggaaaaggagagtggtataaggtttccccagaggtgctcaggactagttgaccctgaaataaatgtgtaggtaacttcaaaacatgccagtaggcatccacagaagcagttttggttgcggtggtggggagagggtgggaggccggctgccgaggtgcatgaaagcccatctgggctgtggacagtgtctggggagggggtgacgagggaggtgctggtcccatttccacctggctggagagagcactgtgtccactccccagtgcatacatcctatctgccctggaagttagggtggggggatgggagatgggaactggggttgctagcagggagtcagtgggtgtgaggaggcccagcctggcccctgcatggcccagagtcaggtatgtgaggctcactgttccagaggagtgaagcaccacccccaagaacacatagtaaggctaacacaggggagaagaggacccagggctttgactcttttatttatttatttatttttgagatggagtcttgctctgtcgcccagggtggagtgcaggggtgtgatctcggctccctgcaacctccgacttcctggttcaagcaattctgcctcagcctcccaagtagctgggattacaggcacacgccaccacgcccagctaatttttgtatttttagtagagatggggtttcgccatgttggccaggctggtctcaaactcctgacctcaagtgatctgcccacctcggcctcccaaagtactggggttacaggcgtgagccaccgcccccggcctctactcttgttccaccttggcgcagctccctgagccctgtacaaccctggacagaggctggggccagcttggtcctgatcagcacccagggccggtctctgctgggctcctgctggagcatttccttgcctgccttccagcaagaccttgccttgccacgtgagtctgacctgagcagtgtcttctgtccgtcacagcctggtcctctgccaggacttgatggaatcgctgcccacttggcacccaggtctgtcctcaccctgcgatggctcttgggtgactcatcaatttgtgcttatatccggtcgtctgtggctctggcaggtcctggtacccacaagggctgggctgccaaccaggcttgcagcagaggcctctggggtgagcctggcttatcctagtcggttccccttcacctcagagcgagtgatttatgagtatcacagctactgctgattgaatattcactgcacatatatgggacgtcagctctgagtagcagatccttgtcggtaaacggactcccagatctcccccagccttggatcctttcaggaccactgcgtggatcacatgtgagtgtgaatgtagaacagaaggataaggcattttcttcttcattaatcatattccatgctagcaaccttccagaagtttcccctgtggctaaggaatatgtaacaggtactggctgtttgcagctgcattcactcagggtcataaggcatcacacgcctggctattggagttctcagccggtggtgtctgtttaggcgattagtgaattaagggcttgtttctttgacttcaacaagggaccacatcccagtgggcaactaacagacactatttgggatggatggccacaggctctctgtgtcagcggtgaagacccccaaacaggcattgttcttgggttatccacaggctgagttctgaccctgcagtgtcactgcagagcagggagccagcctccccgggaggacaggctgacagggaagacacctgagctgctttgtaggggagctgctgtcctggtagagaaggggctgctttgtgttttgtgttttttttttttttgttgttgttgtttttttttttttttttttttttttttgagtcttgctttgtcgcccgggctggagtgcagtggtgcgatctcggctgactgcaacctccgcctcctgggttcaagtgattctcctgcctcagcctcctgagtagctgggattacaggcgcctgccaccacgcccagctaattttttgtatttttagtagagatggggtttcaccccgttggccaggctggtctcaaactcctgacctcgtgatttgcccacctcggcctcccaaagtgctgggattacaggtatgagccactgtgcccagcctgctttgtgttttggaggctgcctgcatgggttccaggagggtgttttgatcaaggtgacttgagggtgcagcagccttggacatctttggtgacatgttcatttatccactcatttgaaaaatctgtttaaagttgccaccaagtcacagtaactgtatcaagaccccaaggcccaaaaaggtgactttcgtgaccccttgctcccagggggcctagagtctagtgagcaaaaaagatacaagtgagctccacagagtttgtgacagaaagtcttgtattttccaccacctacctcctttttccctttgattggtttgggtggtcacgtacccagctcaagatcactgaagccagtggtcctcgaagtgttgtccctggactggcagcatctgcatcaccggggaacttgttagaaatgccaaatcttgggccccatcccagtcccactgaatcggaaactctgtgggtggggcccagccatccctgctttaactagcaccgcttaccctgcgccagtcatatgcgtgggcacttgactgcttcttgccaatgagatgtcaggaagtatttgctgggttttggggaagtcactttcttcctgttaaaaaggccagaatcttggaaggagggggcctgcctcatgcccccttcctgctgctctatgtgtggtcctgagcgcacatatgcatggcattgaagagtcaacgtatggccaggaagggcaatgtcactgtcaccaatcggctgagcctgactgagcagaaaagaccagcccagggagttcttattaacaagacagcaaatgctttcataacattgctacttgtagccaagagcacccccaactgatccaagttcatgaggttgataatgatgtaggtatgaccagaacatctccctggcttattatgatgttgcataagtccttttcttgctctgtatctttgtgacatctgtagttcaaaaaccttggccagaccaacttacaccctttacgatggctactgtcaaaaaccagaaaatcacaagtgttggtgaggctatggggaaattagaactcttgtacactgttggtgggaacgtaaaacctttgggtgcagccactgtggaaaacaatatggcagttcctcaaaaaattgaacatagaatcaccatatgatccagccatcccgcttctaggtatgtaccccgaagaactgaaaaacagggacttgaagagagatttgtctcccatgctcatagcagcgttattcacaatagccaaaaggtgaaagcaactcaagtgtctataaatgaatgtttaagatggtaaattttatgtttgtatattgtatcataactcaacatttttttccatgtccatagaaatgaaataataaacttctttaaaattaaacttttttttttttttaagaaacatggctgggcctggtggctcacacctgtaatcccagcactttgggaggaggccaaggccggtggatcacttgagctcaggagtttgagcatgggcaacatggcaaaaccctgtctctgccaaaagcaaaacaaaaccataggttaactgggtatgggtgcacgtgcctgtagttccagccacttgggaggctgagctgggaggatcgcttgagcccaggaggtcaaggctgcagtgagccatgattgtgccactgtgctccagcctgggcgacagagtgagaccctgtctcaaaagataaacaagtaaataaaaataaaaaaagaaaaaagaaacatacatacacgactcttaaaatccacaccctttccctcatttatgtctgcagggcgatggtcactgttgttcttgcctctcctctgagttccggtctcatttatccaacagacatcttgacatctccacctggatgttttgaaggcaactcaagccagtgtgcctgggtctgaactcctgaccttccttcccaaacctgctcctcctgctgtgtttgcctttggagtgactgccacttctatccattataagtcagaaatcacctcctcctcaatctccttccctggcttaatccatttcaaattccttgtgattgtccttcctaaatacctgccaagggcggccacccctccagtcacctctgacaactgcagtggtacccgacccagctccctgtgcagaccagggcaccgcccacatccacgtttcacgacaggagccagagtgagcttttccaactgcagatctgattgatttcattctagtttcactgtcagcaatcaatgccatatgaaaatatttcacagaaaaatccaacccctcccattataaattgccatgcaggcttcttctgggttgatttctcatctagttataagggccaagctgtcttctgggtctctttggactgagtctctcaggtttggggtctgaccttgagggtgggtgggacagatgtcactgatggttgatgccttagtttgggttgtcccaggtgcagattccgagacaagaatttgagagcaagtagtttatttgagaggtgacctcaggaagctctggcagggctttaggaagcgcaacaggaaagggaggaggccaattcagggcgtagtattcagccagctggtgcagaggacagctggagttcagtcccatggagaaatcacacacaatagaggaatcccaggagcgagggacaggcggtatttatacaccaactcctatgagttattacttgggggttgttggaggtgagtgttaatcccctggcacctcccacctgccacaggtgtgggtagagtggactgctgaggtcatggacaaaagcctgcaggcaaaaagaagaagatattggcagttagaagtggctctgagcctgctggagggttccagggctatgtggagggcacgaacagcatctgctcccctggggatgatgacaggtgacactgggtgactcagatcttcttgccataacatggagacacatggttagaaagccagtccattgtctcaaggagaagagtcccagtttggtgctaataatcttaacacctttccaacactgttcatctccatctggaaccaagaaagagccagccttgggcctagtgtctttggtaggccgtcgtatgtacctacctgcaattgatgatgttgctttggtttctacttaatgttttccaataaacttaagcatataaagtttgctgttgaaataaatttatatagttaaaaaataaattgatctttaaagtgttcaatgccatcccaggctgccctccatgagacaggtggcaggcaatgcctaaatcaaggggacatagtgcacgctctgccatgggcatctcaggcctctgccctctgggttccagcccctctctaacctggttctcacttctccctgtccactctatccaccaaagccgccttctcgctcccactaagtacgttcttggctctggctttgttcccaccccacccctcttccctcctttcttttcaatgtcctgctcatgctcggaggcctgactccaacaccaccccccccaccccacctgagtccccgaccaccccctgcaacacactcccagtgggagctgagggcttcctgctggggccacccccactccaggattatttcatgctggtgctctgctattgactgttgacaggtgggtcccccaccagccccggtgctttgtgggaacagagtcctggccctctctgagcctggcctggtgctgtctcagaagagcccatggtctgtgctgagccagtgcaagagcagagtggaccgcagcttcctcctccacggcactcccgaagcccctcgggtgactccggccaaccaggtgttccagcagagagaaggaggattatgggtgtgactgtggcccttgtccttccacggctcaggccgcactgtgggagctggtcgccttttagccttttagcactggtccatccgtttctttccattgccccgtggagtctgtggccttttctccgggttctgactgagaccagagtccagcctgcctgggggcagttgtacactgccttgagtgcctggtgacagggtgacagcactgccagcgtctctgggttgggtttggggaggcaccagaggcctgagcagacggctggggttggttatggctgctgggaagggcacaaagccaggagtgggtggggcagggagaccatgaggagcctgtgcagcccgttttgtctcagcagaggggcgagtcccagtagcttccccgggccagggcgtcagctgagtcctggcagtgcaggcagcccccaagctgggcatctgggcagcagggaggggggggagcttcagggaggacgcggtgggtagcacgtgtctcaggggacacgtgtgcgtgtgagagggtgacagtgtgtgtatatgtgcgcctatgaatgtgtatgtgactgtgtgcgtgagagtgagggtgtatgtgagtctgtacatgtgtgaatgtgtgtatgtgtgtatgtgagtgtatgagcctgtgtgtatgtatgcatgtgtgtgtgaatgtatgtgtgagtgtaggtgtgttggggcctgtgtgcgtgtatgtgtgcgtgaatgtgtgtaagtgtaggtgtatgtgaacctgtgtatgtgtgtgagcctgtatatgtgagcatgagcctgtgtgtatgtgtgtgtgtgtatgagtctgtgtgtgtatgtgtgagactgtatgagtgtgtgagcctgtgtgtaagaatgtatgtatgtgtgtgtgagagtgtgtatgttgggcgtgagagtgtgcgcatgtgtgggagacagagtgtctggaggaggcagacagtgggatatgggagcagagagagcaaggcgacctccaaggagaaacggtgtctgggcgaccctgagagcctgagatgtggcctgggggttaccatggacggaagggaagtaggggggtcaggacgactcacgctctggtccttgtcactaaaagtcagagcagctgaaactcaccaagcatcactcacatcagacactggtctaagcaccttacatgcattctctatatttttatttaacaaatacttacatcgagcttgccgtgtggaggcactgctctagttgatttacaaaacgaaacaagaagcgtcgaaaacacatcgaatcaacaaaacaccatcgtgaattctcgcaactgccctgtgtgggaggcactgccgctacctccatctgcagaggggtaggggagcctgggagctggtgggcggagggccgggtggggtggaactggcatctgcctccagggctgggctcctcccattgctgatgcctgggtttcactgtgctcgtaaaagccacgggtcaattatgcttattacctgttctgcaggtgagaaaacgaggcacacaggggtgagcaattcgctcagcttgaaagtggtagaaccaggacccagcccaggccatggctcgggacccactctgtaatcactcactgggggccccgcagtaatgagctctttgaagaaaggtgagtcactgaccttggctgtgcctcagtttcttcatttgccaagtggggctctgctgcccctgcctctgccctgctgacttgcaagaagagtgaacgaatggaattggatgaaggcttccggaaacttccatcaggaaagcgccctggcctgggagaaagccggtcctggccggctttgcctgcaatgccctcagtggccagtcacgtcccctccttggcctgcaggttcctcactggagcgggggtggcccgagatgaaccctcagatgcaccaagccccacaccttgattgtccagctctgtcctgatggacaggggagctgcctgcggtgactgtccaggaactgggtgtctggagacgggcagacccaaccatttgaggctcgttctaggaagtgtgttcagtgtggccaagcttggtgactctggggcttctggaatggttcccatgccagagaattacaaaaagatcctttgtactgagaagagaaagtacaacttattctcttagggacaccttcctggagggacaccagacaagaagtccaggccctggaatcagatgccctgggccaggcagcttctgtctccccgagttctctgcggaggcagcactctcagaagattccacggtttaatcacactccagctcttttcagagcaccttctacgtgccaggcatgctctaggcaccagcgatgcaactgtggatgaaaaagaccaaggccctgttctcggggagctggcggggtgggaggggcagtgaaaaacaagtacagcctgcccccgcaagtacagtcacatagacatatgtgtgtatgtgtgcacatatacttgaaatatcaagtggctggagggtttactttagactgggggatgtggaagtcctctctgagatgcgccccctttgatcagaggcctgaaggaattaaatgagtcttccatgtgcacatccaggggaggaagtttccaggcagatggacccgcatgtgcaaaggccctgtggtggagtgtgctgggggtgttctaggagggtcagcatggagggaacaaggagaagagctcgagctgaggttatggagggcctcatgggtcatggcaaagacatctgggtcatattctgagatagatggggtggggtttggcacagaggactttatgtattttgccttaatattttaaaaggatccctctggctgcctgtgagcatggattgtgcaggatcaatgcagggagtcgatgtagggagaccagcaaggaggtgattgccacagtcaagaagggatgatggacgcccaggcctccgtattcggagcggtgtggccaggcgatagcatggtagccatcatcacaagctaaagccagcaggtttggtagatggttgggatatggaggaataagagaaagagaagggttatgctgactctaagatttggcctaatcgccagaaggttgtaggtgcctttttttttttttttttaaatgggagtgaccggcttggagggaagataaggggcatcagaaacctgcacaaacctgcaggagtgtgcactgtgtgaccctgatgcccaaaggtgaccctggggccaagcagtgtctccacccttagtctctggggcccctgcccacctgcagaagggaccctaaacactaacctttgatttaaatccaaaacattcttccctaacgtaaagttgcccagggcagtattggtttctcttttaaagacgccacctggattctattctaatggtgggggtgcatatctagaaaggatgggcagcccctgcggggaaagaatgaatggggccaggtgcagtggctcacacctgtaatcccagcactttgggaggccgaggtgggtggatcacttgaggtcaagagttcgagaccagcctggccaacatggtgaaaccctgtctctactaaaaaaatacaaaaattagctgggtgtggtggcacgcgcccatagtcccagatacttgggaggctgaggcatgagatttgcttgaacctgggagtcagaggttgccgttgtggtaggagttattaagaaattattttaggcagatagaaaggaaaaggggtccttgggaagttttcgtttgttaaagcatctccggaagtttctgtaaagcccgggctcttagagccaggcgggcaacctttgatatgcaaatgccagccattagaaactgggtcgcgagccttcttgccctttcccgacctgttcctggcaacatggccgcccccacatatccccacgtgtgtagaacattgtggcgccctgtatttgcatattaaaagactagggtgggagggccagctttttcatgggctaccatgaatgacatgcctggtcaaaccaatcccctgagccctatgcaaatcagacaccgccccctccagcctctgtatatatacctggctggtatccatggcaggtggggacctcctctttcggctttggagcccccattcctctgcctctgtacaagggagcttcttccttctcccttccttcttgcctattaaacactccgctccttaaaaccgctccatgtgtgtccgtgtcatcttacctaatttgacatgagacaagaaccctcctcccctcatcagaactgtatcacagtgagccaagagggagccactgcactccagtctgggtgacagagtgaacgttcatctcaaaaaaaaaaaaaaaaaaaagaattaatggaagaagcccggcctggtggctcacacctgtaatcccagcactttgggaggctgaggtggtggatcacttgaggtaaggagttcaagacaaggctggccaacatagtgaaactctgtctttactaaaaatacaaaaattagccgggctactcgggaggaaggctgagggaggagaatggcttgaaccagggaggcagaggttgcagtgagccgagatcgcaccactgcactccatcctgggtgacatagtgagactctgtctcaacaacaacaacaacaacaacaacaacaacaacaacaacaacaagaatgaatggaagaagattccatgagtacccagagtgctgcagtcccatgcacgagatttaacgtggctgccacctgtccagatgggtttgtgggaaagcactacatctgtttaagggagtttgaatgttaaagagggatgttcatcgcagaaaggaaattactgagtctgcaaatatcatcaagtgggagaaagacggatgggacatttatggacatgtagtttgtcccagtgaaataaagcatcttcaaacctgtctttactggcatagaagtactgcagtgtcacctaacagagcagtttacatcacagtggtgagtttctgaaaaacaaaaaacaaaagagtgctttccacccatctatccagctttctaaagcaaccgcaataaaatatgtttttgtgcgatggaatttacaaagcacctactaatcgcagaaccctgggctaaggagaagagtgaagaaacagagctcatcctcagtgggcccatggctggtgggagaaacacacggacataaatggcacgcaggatgcagtgggttggtgcggtgagaaaggtcgcagggtccagagaacggagagggtcagagaagtctttttaggagggattgtatgtgagtcagcttgctattggctgcaagtgactgaaacccctaatgaatctggcttacgcagtgagggagtatgttatctcccataacagaggtggacttcagggtgggttgattcagtggctctgcaacaccaccagtctccctcgcctgttgtgggatgtcacaatgtggctgccaccagcaactggcacatgtcttcttgtccaggtgaagcaggaaattttacccgaccccttcacaggtgggacctggagtatcggaagctggagctacccggccacttcggtgccagcagggcaaactccactcactgttgtgctcaaccccttgtgggagggagcatgtagatgagcgggttcaggagctgcggcgagtgcctttgggcgctggcaggagcaaactctgtgctggccccacagcagcgtctaagggaggggggtacctgcaaacccggaaaccccagaggacgggcgtcacagtgctcttttagctttgctgtccgcggatggcttaagtgttaaacagctcagtgggccctctgcctttttgcatgaggttgtttctctccaccagcgagagcagacggtcagtgtgacagcctttagtgtccacacctgtggcacctgagctcttattttgcatccaggaaaaatcaggtcgcatgaacgaattggacggtggtgaatatggaggattttattgccgatgaaaggggagatggaaaagggatagagcgggaagataatctttccccgctggggaacattctcttcatcctcttcgaagcaacactgtcaagccgtccctctgaagtcaagctgcttctctccaacgtccagctacttctcctcttctctgctggagaagcctggggtttttatggcacaggatggggggtggggcgtgtcatgtgtggttttggaaaggcaacattcaagtcagaaaacaggaatccgtgttctcacttcgggccatggttccaggtttgagggtaggacccttgctggggaccgccctcttctgcccagagtttctctgcctcctgtccctatcacaggtcccctggcattgagagagaaatcactccttcaagtgtgggatgtactccttgtcttcagtacaattggccatcttggcccatgtgtcccttccgggaccactgacaatcaccaggagattgctgaatgtagtaactgtagactaattgggatgaccctgaagctgaggaccacgtcagcatcccctgaaccaaggggctgcatggggaacaggtagacaccaggacaaagtcaggcttctgtcaggaggaggaacgtgaagaaggatattggttaggcagccgtctgagcagggctttggtggagtggtgtgcttttagactagcagagatgacaacaattactttttgcgtgctactcactgaaattagagctttcaatgcagagtagaatcttctctgtgcaactcccttaactcactcccctgatgcttccaagccctccgttcctctgtaagtagagggacaagcccacagcttggggctatctgccactctctgaaatgcccatcgtgttctctgcctgctgaaattcaggggtttgtttccaaacctgtttactctggatatacctggcattgcaattgcaaaacttagtaaacatagcaaacggataattaggaggggaaaaagaaagggagttgctgtttttatgaacaccaagttgaattgtctggaaagatctcttaagggcaaaaagctgaaaaagagatcagaaaaatattgagaactgcccagtaattgcccaatataatagtcattgctgcaggcagggcaccatggctcatgcctgtaatcccagaactttgggaggctgaggccagaggatcacttgagcccaggaattcaagaccagcttgggcaatgtagggagattctgtctctacttaaaaaaaaaaaaaaaattagctgggtgtggtatgcacaaccgtagtcccaactacttgggaggctgagatgggaagatttcttgagcctggggattcgaggctgcagtgagctatgaatgtgccactatactccagcctgggtgggagagcctgtaatctcagcactttgggaggctgaggggagcagatcacttgagaggtcaggagtttgagaccagccttgccaacatggtgaaaccccaactctactaataatccaaaaaaaattagccagatatggtggcacccacctgtagctccagctacttaggaggctgaggcatgagaatcgcatgaacctaggaggcagaggttgcagtgagccgagatcgtgccactgcactccagcctgggcaacaaagagactctgtctcaaaaaaaaaaaaaagggttgaaagaaatagtcattgctgcatgtgactactgagcacattaaatgtggctgatgtgactggacgtggtggctcacacctgcaatctcagtactttgggaggccgagatgagagaatagcttgaggccaagagtttgagaccagcctggtcaacatagcaggacccccatctctaattttatttaattttatttatttatttattttgagactgagtttctctcttgttgcccaggctggagagcaatggcatgatagcggctcaccacaacctccgcctccgggttcaagtgattctcctgcctcagcctcccaagtagctgggattacaggcatgtgccaccacacccagctaattttttgtatttttattttttttttagtagagacagggtttctccatgttggtcaggctgctctcgaattcacaacctcaggtgatcagcctgcctcagcctcccaaagtgctgggattacaggcttgagccaccgcgcccggcctccatctctaacttaaaaaatattttttaaaaatgtggctgatgtgactgagaagttgaatttttaattttgttcaattttaattaatttaaatgattaaaaactgatatgtgattcagttattggaaagcttttaaatatgtttggggatagttgtttatgtgaatctactttttcagctgtcaaatttctaaaatcgaaatagaagtcaagtatatctgataaacatggaggtgcactggaagggtaaaactcacaccagagtttgaagacttagaatgaaaaatgtaaatgaccttcatttttacatttattgtatgttgaaataatattttaggtatgttgggttaaataaaatatatcattgaaattaatttattctgtttctttttagtttttttttcctaatgcggttactgaaacattttaaattatgtttgtgattcacattctatttctactggacaatgctggtgtggaaggatcctgcacccggattgcgtggcaagtgttttcataccctcattccacttcaaagaagccaaaactgaacattgtagaattatataaagaacaaagacaatgggagaatccaacagcaggcccacattatgaagaaagtcattagccctggcatgaaaatattcgtcaattataggagagttgcatgttttcttttaactgtataaagctgtgagtgtaaacgggttttttttttttttggattccccacccactttagcatatttagctttcttaatgagcccgctgctggtcccagctgtgctgggttttctggacagtttctcctggttttatggcagcccttggaggtcagggcagttatgacgattctcactctggagctggggaaacaggctcagggagggcgcgcgacaggctgagggtcccacaggcagtgagcagagaaataaggagcggccagcgggggtgccagcctctgtgccctgggattctcttctgcattttgtgttcatcgcctggccctggtggctgtaccttccttcccctccatgggccacagctctggctctcataagaggatggccctggggctcctggatctgccttgcctcaacagagagctggttgtgtctggagtgcaggtgtccggaagcccagctccctgccctgaggcaggacaaggagtggctgtgactcacaccctgggctggattcccctgcagggtgggctgaagcctgcctccctccctaaggggcttggcttaaggccgcaccctggcccggcttcctgctcttcctgatcccctctccctacccctttctcgtcttctctggtgcagatcctagatccagtccttgcatgaaggtcctcctctcaggatctgcttcaacggtacctgacataaaataggtgcatgggacggtgggagaggagcattcagaaacacgctggggctccatactgcatgcttttcagacactggggcgctgggaatgcaccccttgttgcaaacctcaccttcaattcctgccccatgtaaagccttagggaacccccactcagcggaccccttcccagatgggtccagtccagcatcccctctgccctcggaggttcccagcactcttgggggaagaatagtctgagagatgctgtcctgcttggagagtagcccagcctctgccggtggtttctcgaagccctgctctttgtcttgggccaaagtgtctcctcctgctaattccctcctagaaatctcctttcgaatgtccctctttcatgttagggtggtgactggtggctttcatagagatttccacactctctttagaacaaattggttccaacacttctaactgtgggaatgcagccaaaattctgagagccctggaaaagtctggttcactggattcactgtctcagaagaggactttttcctggaaagaggcatctggagcaatattggtatcagggctgtcactgaggccccttttctgtcaagagcaccatcagtgggcagtggtcagtggtgtgggcctggtgctggccaggggtcctggaagtggctccgctgtcctgcagccatgggcccagggagcattgattctgcccagcccggctctgttcatctgtgagctgaatcccaatagcatcgttgagctcagtgaggattaagcaagttcatgcacccggagagctcagaactgcagtccccggcccgcagtaagtgctgtgtgtgtcagcccatcgtcgtccgctggtgccggtcagggtcacagatgagccttgtcaaaatgcagcccgggatcagggctttgggcttaggaagtgagatttctgtaggagcgctttgagatttagcctgtaatgagcagctttgcttctaatcgctcttgagagacaagccatcaaacattggttatccctaaactgagagcagaaagggctgaggggaggaacaatggccctggctccccctgccatgcacccactctgccagctgatgacagacgcagacggatggaggacgttccaaagtcgaggctcagggctgctgccttttctccttctgcttcttaatttaaaaaaatttatcctagagtctccgttactatagattccctgacagtctgctgtgggctaatcttcaggataaagcatcaccttttttgagtgtttttctccttcaggtttttctcttttatcttgaaaccaggaagaaacctatgctctcattcaatgctggaaaatgcatcccttgctcatttttaaaccttttcatcttcccttcattttctgcctaaatgtctcaattgtgtttatctttctctttcagggatggcagatgcttaagtacatgcaggctgtgaagtgagttgtaaataagatattgttattaggactatccctgataagaaaggcatgtcctctgcacctctaatcctgggccactgctatgcatccccacttagatgaccgactgcagtcgctcagagcaattgtagaggatggcaaggaatcaacctatttggatgaagacgttttgtgggcgggcagagaagaaaactcttgagagaaggaagcattgccaggggcatgggagcctacaactgctggtgcctcagtcccatctttgaccaattcattcaacaaacatttatcaaggaatgtctttgtgccagaccccatcctaggcatggggcatgcaagaaggacaggtccctgtacccatggaacccccgtgcaggaagcaaaacaggaaatgaacaattaaacaaatacacagtgtaatttcagatcatactaaatggtggaaaataaagtgtgttgatgtgatagcaagggactggggactagggagcgtccgggattgctgtctgttaggagatcatatttgagttgagactcgaatgcagagaaggaatctactgagcgaaaactagtggaagaagcacttctgttcaacatagcagtggaactcctagtcagagcaattaggcaagaacaataaataaaaggcatccaaattggaaaggaagaagtaaaattatctctgtactcaagtgacatgatcttatatgcagaaaaccctaaagattctacaaatccccctgttagaactaataagtggatttgacaagttgcaggatataaaatcaatgtgcaaaaatcagtgaatatgaacaattcagaaagaaaattaagaaaacaattcaatttactatagcatcaaaaagaataaaagacaggaataaatttgaagaggcagaagatttgtaccaaaaactataaaaaactataaaaattgctgaaaaattaaagcagacacaaataaatgcagacaccagatgatgctcatgaatcagaggacttaatactggtaaaatgcccttaccttccaaagcgatctatagattcaatgcaacccctatcaaaattctaatttttttgtggaaatagaaaaatttatactaaaattcatatggaacctcaaggcacctcaaatagccaaaacaatcttgaaaaagaagaatggttagagacatcacacttcctgatttcaaaacttactgcaaagctacagtaatcaaaacagtatcatactgacataaagataggtgtgtagaccaagggaacagtacagacagcccagaattaaaccctcacatgtagggcagatgatcttcgacaaagatgctaagaccgctcaatggagaaagaacagtcccttcaacaaatggtgttgcaaaaactgtatatctacatacaaaagaaccttttatcatatataaaaattaactcaaaatggataaaaaacctaaacacaaacctaaaactgtaaaactcctagaataaaacataagagagaagcttcatgacattggatttggcaacgatttattgaatgtgaaactaaaagtgtagacagcaaaagaaaaaatagatacattggactacagcaatattaaacactttgcatctaaagacacagcagagtgaaaggtaacctatgaaatgggagaaaatgtttgaaatatatataaggggctaatatccaggatattaaaaacaaactcctacaactcaacaacaaaaaaagaaataaccctattataaaatgagcaaaggacttgaataaagatttctccaaagaagatatacagatggcccataaacacaagaaaagatgctcagcaccactaatcattagaaaaatgcaaacccaaaccacaatgagataccatctcatgctcattaggatgtctactatcaagaaaacagaaactaacaagtgttggtgtcggtgtggaaaaactggaacccttgtgcactattgatggaaatgtcaattgtatacccctatggctataccctatggaattataccataggggtataccatgggggtataattgtataccataggggttaccatgggggtataattgtatactataggggtataccatgggggtataattgtatacccatatggaaaacagtatggctgttcctcggaacattaaacatataattaccatgtggtccagcgattcctttctgggtatataccccaaaaaattgaaagcaaggacttgaagaggtatctgtacacacaggctcatagcagtattatttacaatgtccaaaagacggaagcaatccacgtgtccattgacagatgaatagataaagaaaatgtggtatatccctacgatggaatattactcagccttagaaaggaaggagattctgacacatgctgcaacacggatgaagcttgaggactttatgctgaacgaaataagccagtcacaaaaggacaaatacggtatgattccacttataggaggtacctagagtagtcagattataaagacaaggtggaatggtgaccgccaagggctgaggggaaggagaatggagtcgtatttaacggatacagagtttcagttttgccagatgaaaagttctgttgagggatggtggtgatcgtagcacaatggtgtgaatgtagttaatgccactgagctgtacacttagaaatggttaaggtggttaatttatgtgtgtaatttaccacagttaggaaaaatgatcagaagagagttccatgcttagggaacagcaaatgcggaggccctgtgggtaggaatgagcttggcagatttgagacaaaggagtcctgtgctctgggagcaaagtgaatcaggtgggggagtggaaagaggtgtgaccacaaggacagacaggggacagaacaggctggatcttctgagtttgcatttgatatcagagatgtgaaatctgagattcacaacaaagatccccagtaacttgcccaaggtgaaatagtcagtaggtggcagtggcagggagtccaagtggttccctaacagattagctgtttccccttcttccttagtaatagaactactgctgactatcagttgtgcctatggtcacccagagtcatgactacctttcccagcccctttgcagctaagcatggcaagggaacttagtcctagacagtgggaaagtaggcaaaatcatcatgtgcaactttaagggtgtgtccttaaagacagaggtattctcttctttatcttttgtgctttcctgctatctggaatgtcagtgtgatggttggagtttggcagccatcttagacccatgaagcaagggagagtgacatgacagatgggagagtgtggccgacattggacttgggagttgggagggctcctgaggtggtgtcacttgacctgccttgtctgatgaggaggagccagtggagggtgggcatatttaagtaaggtcactcctggtagaaggatctgaggtgggacaagctgggagtaagagggggtggtggttggacacagcagggaggctggagggactgagggcaggtgtgaggggagcttgggcagagacaggagctgagagggggcagggcctggcccatcagtcccgtgatggggacactggaaggttgtggtcagagagctgcccagggctgattcagcatgagaaggatccttctaactgctgtgtggggaaggggctgctcatgaccaggacgggaggccagggcaaggctggggagccattcagggtcagcagatgctggaagatggaatgggaagcacatgttctgtagagtatagagtggaaccacctgcgggatgatgggccagcacctgccctggactcagggacatctgtggctgatgattgtgataaagatgggggatgacctcagagctcccttcccagcctgcgtttctgcagggaaatgtcaaatccagggaatggaattgatcccagcataaaaaacacatgacactgtggagccaggaaggaaggtcatgagaatgttatcagatgccatataatactcaatataaaaccaatcaataataatcagaagtaatcaatataaagccaataatcaatataaaattcaacgcaaccgtaatgagggtgatgatgcctaacattttaaacccttgcatcccatgggcagatggtgtactgagcactttactggtattttctgccttaacttgtctgataatcctatgtaacaggaactatcattatcctcagtttatagaggaggagactcaggcacagagaggtttaaataacctgcccaaggtcacacagctagtaagtggtaggcagtgggctgggatttgaacccagagaacctgcctcccatgcaggtgttgtgtgcaaatttggctcagccaattggattctcttgtctagatccaggaggtcttcacctttctggatatctggctcacttgcatcctgtgattgtgcccccccagagtgagggggtgcatcagggctgaggatgctggtttgagtctttgagcagcatgtgagacaaaccgagcagcagatgtggccaggtgggaaagccgacacctcctggactctcgaaggctgaactggagacccagggacagggacgggagggtcccatgggagtccccaactcttatcatcatttccgtgttcatttgttcttgggagaggggacatcagagcctccttcccccattagaatttttgctccaagaaggggtttttgtttgatgtgtgtctctagtgccttgggcagttcctggctcaatatgtatagaaatattattgtaataaagatgagggcagcgaccttatctgtccctttcaacccagcacctagcagagtacctggcatgtggtaggactcaataaatatttgtagaatgaatgaatggatgaatgaatgagtgacatctctcaatccttccccatacctgcctcctctgtcttcaggaccctttcctcctcatctcattccaacatccctgttttggggctttcttgggtggatttggggccccattgtgctcccccagtgcctgttttaacagcctccctcctgccaagatgacaaatgtctctcagccctggaagctgaggctgcctccactgtgaagctgataccactgttggaagatgcttcctcccacattggcactgctctgctgtgccccggggttgcggcacctcctctgactggcccttcacttcagtcacactcctggaaacaagttcccaggcagaccccgtccccaaagtctaggattcaattgtctgcttataccagtgctaaaaacagcatgatttcccccaactcagctgcacctgtgcagacaagaataagacagcatatttttagcaggtaacagactgcacacatgcaggctataattagcatttcattcaaagggaggagtttcccatccaatgcaagagtgactgaccacggggtcttctcactgcagcctctgtctcaggtgcctggtgcaggaaggagccagcagcactgagggagaccctggggttccctgggcacccaggaaaggggtggggcctttttggatattgctcccgtcactgctcatacctttctctctggcctgtccagagccttggtcctgcccagaccctagtgctgtcctcctgtgaggatgacctggccaggccatgtgatgaaggtgccctgtcaggttggtgtggggcttgcaggtcctctgtcctgcactcaagctgccccatgggggacagggacagggctggggttacccagctgtggcagagactgctggatgacctcagcatccctcctggtagcagtgagcctagctgcctggaataaagactgcatttcccaggcctccttgtgaccaaaacatggccagtggggtgtgaacattgtctttttttccttctctttggatgggagaaaacagggtacagatgtctgggatgaagcagaaggcaacggtctcaaaaatccgaggataaagatagaaggaggtggggcctcagtttcctctgctgtaaaatggaagagtaattatgtctatgttctgtggtttctgtaagttaagattctttcagctgctaagtgaagaaaaattaaaccccaatggtctaaggcaaaggtggatttattggctcaggtaactggaaaaaaaatattcaagaaagaggctgactcaggcatgactgtttatccatagcctgggggacctgacttgcctgagttacccgtggctgttattttccccgtaaatttgttcatgtgaccagcaattccggcttgaaaggaccatagaatcttattgtaaccccagtgtttaaatcctgagcgcacgggatgtccaaaatcatcatcgtcacgatttctgccattcacagagctgacatttttcctgctcctcccagctcttttttctggcctctgctaaggtcgaattctccactctgcatctcacagctgcccttcttgcttctgcaagggtccctccatccaaccacatcgtgggcttcttcttctgcttttcacatctccaagttccacatccccaagtagctaatagagacacattttactgaacattttggagcaacccaggagtgtgatttcatccatgccccggtcctttggccatttctgccaactctaacatcagtgtatgttgcttagcaactccatttttgtttttattaagaaactttaattcaaaaggaaaactctatcaccagagtaaatagaaaaccagcatcttttccatgcaaaaggatgatgactgtagaactaaaagcaataaacctaaacagaagggcttcattctgcaggaagcccggggcctgtcctttctttgttcaaaaggatgaaatgcaaggtctggaaaggagctaaaggcgcatcagcaccaaatcaaggtgttttctttgaggtgactgaagaattggagaagaaccactacaggattcagcgatcttagtgctagccccgtttgctttgtcaaatcatctcatgtttatcctctgggagttcctgagctaggagggctgttgcggggctgggagaagggagttccaggcagcggggctagcgtcacacaggcctgacaggaggtgggggccctggttcaaagaagtagcagaagcccgggtgtggtggctcacgcctatcatctcagcactttgggaggctgaggcaggaggatcacttgaggccaggagttccagaccagcctggcccacatggtgaaaccctaactatttttagtctctatgaaaaatacaaaaattagcctggtgtggtggcacacacctataatcccagctactcatgaggctgaggcgaaagaatcgctttaacccgggagacagaggttgcactgagccgagattgagccactgcactccagcttgagcaacaaaatgagactctgtctcaaaaaaaaaaaaaaaagtagcagagagaagccagtgaaacaggaggaaagcagaggaggtggaagaggagagcaggcaggggccagatggcacagagcctggcagccacagtcaagggtgctgccgggctggaaatctggggcatgagggcgtcaggtgagtgctcttaaaatccaggtggcctgggaaagagataaagcatgggggacattcagccaggcaggaccgggtcccacccatgtgccacccccagtgtggcctctgcccctccctcccagcaggtgaccccgcatccctcggaggctgaggtgtggggtaagtggaggctttgagtctttatttcctgagcccacgtgtccctgtctctcggcagggaccctcggccagctcaggggtaagaatgcagtgacagtcagcggtgatgtcccctgtgaagagccctgattggatttccgaggcatctccagccatgagggccgcagacaggccctggccagggacctttatccgcatgcctctcactcccctgattgaatctatcgattccctgtctatcaccaccttccccgagacacaaggatgggatggtttaaatgatttacttatttcaagccactggggcttggcagaaaaaccaataggtgaatgttagaatgttttcccttaattattcaggctctctgaagaagaatctgaaatatctcgctgtgaatggagccaaggtagagatgaggctgcagctgcaggaagtgttctctgaaccacctgccctcctgcctgggtccccccacggcacaggtgtatttaattcacctgtagtcagtgaatgttggtggagcacctctgccacattgagcactggtctagctgcagagacacagagatggaaaccatgcagcctcggacccttcagctactcacaatctattgaaagagggggtgtgtttggggcatgattagagctatagtttaaggatggatagaccaggttaggagcgcagtgaagaggaaattcatggaagggatacggaaacagagctggaaatgtacacaagggtgaggatatttgatgcttaagaatttttaataaattatttccttcttttgtttctttgaatacaaaagaaacctttacaaaatttaaaaaataaagattataggccatgctctgatcattacaaatgacattaaaataaatggtaaagagatagccctggccagatgtggtggctcatgcctgtaatcccagcactttgggaggctgaggcaggtggatcacttgagctcaggagttccagacgagcctggccaacgtggagaaaccccatttctaccaaaaatacaaaaaaatggccagatgtgggggtgcacacctgtggtcccagctactcaggaggctgaggtgggagctctcatttgagcccgggaaacaaaggtagtaagctgagatcgcatgccactgcactccagcctgggtgacagagtgagactctgtctcaataaatacataaataaatagaaaaaaagatagccctgctaggaatgctctgtgtcttgattgggatgatgtttacttgagtagacacatttgtcaaaacgcattgaatgggacagagaacagtgccttttactggggaaggaactctctcccagataactcccagatcaaagcagaaaccaaaactagaatgatggtttctagaaaacaacaagaatagtttacaccagcatctgagggactcggctagtgctgtactcagaagaaaatttatagtcttaaatgcttgtattgctccagggtttcaaaagggcgatggtaaaagtactgagttctcaaaaaataggaaaaaacaaaaaacaaaacaaaacacaaccaaaaaaaaaaccctaaataagccaagataaaatggggagaggaaattaaagataagagccaacatcgaatatgcacagggtgtggacggtgagtttttgggggagttagtgatgggagcacgccgcttcggaagtgtatttttccatttcaggagctggagggtttttacgcagtggagtgaccatgcgtggagctggatggagaaagaccgtggaggctgcagggtggaaagctgactggggaagactgatagtcactgtctgccttgcctgttcttgttctcttcctgggctctaagatttctttctttctttcttttttgacagagcctctctctgtcacccaggctggagtgcaatggcatgatctcggctcactgcaacctccgcctcctgggttcaagcaattctcccgtctcagcctcccatgtagcttggactacaggcatgtgccaccgctttcggctaatttttgtatctttagtagagacagggttttgccatattggccaggctggtcttgaacccctgacctcatgtgatccacttgcctcagcctcccgaagtgctaggattacaggtgtgagccaccacgcccgtccaagatttcttttccttctctaaatcattacagggggtctggatgctagctgtgccctgccgctgggttatgcagcccagaaatgaaatttcaagagagtgggttcatctgtgccaagtcacatcttcaccaaagaaatctgggctctgatggggtctgcgatggacttgtacgtgtgccatctgggggatggagggtggggtggtggccaggacgggcctgtctgggaaagaggcttccctgagccaagacagtgggggccacaggggactctgggatgggaaagccagcccagccagggtccttgggggatctggaggggacgtgacaaagcaggagggtaggaggggagccaggagtgggaagctggggaagccagagcagcagaggctggagcaaatcccgtgggaaagaaccaggaatgggtggttcctgagggagtggctcaaacaccctcgcaggggggtggctcacctttaaagaatgtcttgctcaggccgggcacgatgtctcatgcctgtaatgccagaactttgggaggacaagtgagacgaggttggttgcagtgagccgagatcgtgccattgcattccagcctgggcaacagagcgagactccatctcaaaaacaaaacaaaacaaaaaatgccttgctcttcctcaatcaaaatccccctgggagtaaaagatactgaatgatagcatacataagaaaagtgcccaggccaggagtggtggctcacacctgtaatcccagcactttgcggggctgaggtgggttgattacttgaggtcaggagtttgagaccagcctgggcaacatagtcagacctcatctcttaaaaaaaaaaaaaaaagaagaggaagaaggggtaggaggaggaggaggaggaggagaagagaaagaggaagaaaagaaacgtgcccagatcataagagtacatttcaattaatcctcaccaggtacacgctcctgtgcccagaccctagataaagaaacagcaatctcactacacagagtccaactgaatgcctctcagagggccacattctcctcttcagtgttgaggaaattggatccaaaagagccttgggtctcttttggttgtttcatttgagtattctatgggcagatttttatgtattggacttcttgaaatgggacttacctgtgcttaatttatcttgatttcagcccactgggtaataaatacaatggacccttgaacagcacaggttagaactgccagagaccacatatacgcagattttcttctgcctctgccaccccgagacagtaagaccaaaccctcctcttcctcctcctactcctcagcctactcaatgtgaagagacaaggatgaagaccttcatggtgacccacttccacttaatgaagagtaaatgtatactcccttccgtatgattttcttaataacattttctttgctctagccgactttattgtaggaatacagtatatgatacatttaacatacgaaaactgtttatgttatcagtaaggcttctggtcaacagtaggctatcagtagttaagtttttgcagagtcaaaagttatatgtggatttttgactgcgtgggatttggtgcccccaactcccacattgttcaagaatcaactgtattccaaatgacagaatgtaatgccagacatctggaaaagactgatacagttttccgaccaccagaagaaaatccacccagggaattggtcagcggaggcaggcactcaggtttcacggagccatgagttggagggattctgccagcttgggtgatgaggggctcacaggtcccaggaaggtggcagtagcctgggagctgcttccttgaaaactctgaacgggctgggacctgtggagagggacaagcgagggctcaagggatgggtctgagctggtttttaaagtttatctgtgttagagaaactgccgctccaacaccaagaataaatcagctccatttcccatcacctcggttgcttctttttcccatctcttcctctctgtaagttttgcctaagaaaaatgtatcatgttttctgaagacaaccgcttccccctcctcccttgtgaacagtcaggcaaagaatgaatttagatttttttgtagtgtcaaggcctctctcattaaattactcccaccatctcttgtctctcctggtgagtgagtttaatgatctcttgctccttactctcttgaaaactgcctcgtgtgcttctggcttgggcaatcttaatgctttgggcagctttcagtttcctgactgtagcttgcactccagacttcatccccagcccgtccccatcctcttctccgcccagcgcttcccatcttcccacattcctcttctcatcccctgttctctctgcacttatttgctcactgacattcccatattttctacttctactgaaatcctgattgtatccagtcatgcttttttgattttttaaaaacactgaaatgtctgtaattccaacactttgggaggccgaggtgggcggatcgcttgagcccaggagtttgagaccagcccaggcaacagggcaaggccgtatctctataaaaaatacaaaaattagccgggcatggtggcatgcgcctgtattcacagctactcaggagagcgaggcaagaggatcgcttgagcccaggaggttcaggctgcagtgggccatgatcacaccacggcattcagcctgggcaacagagagagcgcctgtcttaaagacaaacaaacaaacaaccctgaaattttggctcacacctgtaatcccagcactttgagaggccgaagtgggcagatcacttgaggccatgagttgaagaccagcctggccaacatagcgaaatcccgtcgctactaaaattacataaattagctgggtgtggtggcgggcacctgtaatcccagctactcggggagactgaggcacaataattgcttgaacctgggaggctaaggttgcagtgagctgagattttgctactgcactccagcctgggcaacagagtgagacttcgtctcaaaacaaacaaatacacacacacacacacacacacacacacacacacacacacaaacacaaacaaaaacccctgaaatgtgatgatgaccgttgtgtccttatcaacagccattgcttgcctgcttacgttagttgcagtgggagggtaggcagccagaagtattgggcattcccctggcctgtgcattttgaatgatgaatacaaaactgctcaattcaccaaaaacaatcatgtaagaaaggaacgtttcacttcttcttatgggcccctgattgcatgtgatgcaggtgacaattacatatgtccccttaacagtttggaaaattctagtgaagagaggagtttaagtcccttcacactgaactgaaacaattaattctctataaaaatctccgcatgatggatcatgttgcatttcaaacctctacagactgtctcatataaatatctgtttctcttttttgagacagagtctcgctttgtcacccaggctggagtgcaatggtgcaatcttggttcactgcaacttctgcctcccaggacctgcagaggtcctggtctcagagttcatgccctgcagttgctgtgtgtccagcagctggcagggcaagagggttggggggtgggcgtcacccccacagacacacagcacccggcagaaccctggcctaaaggcgcgcagctctggggtctcccaagcccacctgggagtaggcccatggggacagctgtgggggacagggactcccaatgtacaaaacaggccatgagctgggcaagctactccttctcataacctcagacctttcttctgacccagtcaggaccagctcctgggagcctgcagacaatcctgggcccagagaagcaggcagatgtggctgttggtagcactaatatgggttgtgaatatcatcctgtggttattactttacttacgttacctgccagtacactcgatcctgcatatgtcccctcacttcacgctcacggggtttgaatgatgggacgagcactcccagcaggtgatgagggtgataaatggcacctgacattcctggagcacctgttggtgcgcagggcggggcttagtgctctgtttgagtctggagactttactctgcaacagcagctgtgtgacccccggtaagtggtttaacctttctatgcctcttctttctcaactctaaaggtggataataaagtccctgccctcaagcaatcaaagatgtgtaagaagggcctggcacatggcaggcaggcagtatacatggttgggattaaccccactatacagatgaggaaactgaggctcagaggcactggcctggcaggaagtaggaccttcgcccaggcttgtctgatgctgagcgctttggcctccatcccttatggctgctccccactccacactgggacagatcctggagaggcaaaccccaaataccctccctaaccagaaaccgaaataccaaaatccactagatcccagcccttacagctgccttcagaagggacagagcagagggccaccccctcacacgcacacaggggctgaccatccaaggttgccaatcacctggctgcgagcagccctgttcccacggggacactgaccgctccgagtgcccggcattcaggcctcgagccacccactctgcactgcacggggcctccttggaacgcgtccctccccagaggccgtttctctgtgggatggcgctgctctgtggggaggaccccacctccctccttcacgacgacctgccctcacctggctcgtctcttggtagacactgtcccacgcatctctgtcatttgcatgccaccgtggtgacagtcttcctggccacgggtgtgacagggccttttagtttctgactgacacagtcacagcccgatttcacctgattccacttacaaaggcaggtttcccttcccagcctcacatggaggtggtctccgtggagttcaagaggatgtgggctgggaggaggggcagcaaagaaccccagcacaccccaagcaggaggtggcagggtccgtccggccatctggagacagccaagacccttggccactgcagatccccccactgagcctgcccccatccccactccacactggaacacatgctggaggggcaaaccccaaataccctccctaaccagaaaccaaaataccaaaatccaccagatcccagcccagcatggccagatagtctgactttccaacgaagtcgaaaatacagatttttagaattaaaatgtaaatgctggcaactaattcaaattcaattttgtggtggtgtttttttgttgttgttgtttttgcatggagggctttctggtgaaaaccagaccccacctgggagcaggccccggggggatggctgtgggagaaggggaccccttccccgcaagtacaaagaacaggccacgagctgggcacagatgcctcttcccgagcccacctgggagtgacaaccggaaaacgtgctagacaaattctgaaagagctggaacaccttacattattttaaaagtccccaggttgagttaatcccagaccctttacagctttttccttctgattggtgaggcctcagctcaaatgtcacctcctcagagaggccctcccccatggccctatttaagtagcccccaccagagtctcagtcagcgacacgcacccttcatttccttcttggcgctgacccctacctgcaagtgcctcgtcatttgcggttggcatctgcactgtccgtctccaccagcacttaggctccgtgaggacagacgcacgtcgccttgtgccctggtgaatcccaaatccctgccctgagcgcagtgcctggcacagaacagacacaggcaatgagtgctgctgaaagttccccatggagccagtggtgatctgtccaggctctacagccctcccgctaaacgtgttcagagacggggacgctggggccatcctccttgctccactcctggtgaagagccctcagacccataagatgggcttgtccatatcaccttctcaggtgagcctcatacataagcaggttcagtgggttaaccaagcctacatctttaacccacgtgataaccacagtaccaggtttctgccatcaaatcttttctatcctcagtcctgccttgggaattcaaactcacccagaattcagagtttcacagactcagaagagaatgtgatgccagattgttctgaaatgtttggttttaaagcaagatcaaatgattacatttgtgatctgaaatcatttgattgtatcaagccatatccccttccaaattattttctttaaattctccccagaacggggagcagtattaattgtttccaatgaaaagactgcccctttcatcaaagccatgagctttatctgctgtttttgaatataacactggcttagtgaaagtgattgtaaatagcaggtcttctttgtgcattttgtgcttccaaatgtgctacttggaataaagaagtgaaaagtttaaaaatcctctcttgtaaatgtttggaaattgcactagagttatttcttgctctttgaggggagaggtcaccctgcaaacatacagtcacacctgttcggctcccccgggttttgaatgtcactaaacccccacttcccccctaccttggcaggtcagactctgtgaaggacgctcactgtctgtacgacctcacaccaggcacagggactgggggaaagagacacatctggcttgtgggacattcctgcaaggccagttttctggtagggaggtgacacctgcaaaggaatctctcatttctcccagctccagccagtttcaacaacaggtggggttttctttcctctcaattgttatagatttcttttctaataatcaaagtcatgactcattttgaaagtttttaaaaatagaagaaaacaagattttaaatcacacgtgataccaacaccaaagataagcagcattcgcattttgctatgtagtgctcctgttagacatacacacacatatgatcacacttacacacttatgcatttttgcttcattaaaatagaatacagctttatgggccaggtgcagtggttcatgcctgtaaacacaggcagatcactgaaggtcaggagtttgagaccagcttggacaacatggtgaaaccctagctctactaaaaatacaaaaaaatagctggatgtggtgcatgtgcctgtaatctcagctactcagaaggctgaggcaggagaattgtttgaacccaggaggcggaagttgcagtgagccgagatctcaccattgcactccagcctgcacaacagagtgagactctgtctcaaaaaaaaaaaaaaaagaagagctttgtttacactaaacaatattttgtgtccatatttacacatagataacaacagatcactatcatttttggtatgggcatatgtagatataagtattacatgaatttcctactttttatccagttatggtcatatcacctatcagtgatttaacttcagccaagacagaagtttatctcatgaaaaccaagactgggccgggcacagaggctcacgcctgtaatcccagcactttgggaggctgaggtgtttcacttgaggtcatgagttcgagactagcctgctcaacatggtgaaaccctgtctctactaaaaataaaaaaaattagctgaatatggtggcacggaccggtaatcccagctattcgggaggctgaggcatgagaatcacttgaacccaggaagcggaagttgcagtgagctgagatcacgccattgcattccagcctgggcaacagagcaagagtctgtctcaaaaaataaaaaagtaaaaacaaaactggaggttctcagtctagggtggcgttagggactttcatttccttccagaggacattctgctatccgcagggtagaagcctaatcctcaaggttcaaggtgacaagaatagctccaaccatcatacgcttattccaggaagcaggtcaaaggatggaacaactaagaaatgacattaaagatatgtgtcagtccatctgcgttgctataaaggaatacctgaggctggttatttatagaagagaggtttaattggctcacagttctgcaggctgtacaagcatggcaccagcatctgctcctggggaggcctcaggaagcttccaatcatggcagaaggtgaaagggaagcaggtacatcacatggcgagagaaagagcaagagagggaggaggatgtgccaacccctttaaacaaccagatctcccataaactcagagcaagaattcagtcattgccatcaggatggcaccaagccattgtgagagggatctgcccacatcaccaaaacacctcccaccaggccccacctccaacatcagggatcacatttcaacatgagatttggaggggaccaacatccaaaccatatcaagacagaagttacagaagggggtctccaaaaataccacccaacacttttattgcctcccattggccagaacctggtcacatggccacaactcactgcaaggaagcctgggaaaatgtagcctgtgcccgcccactaggagaggggagcactggtgccagggtgtgggaccaccagtgggcatttatgcttcctacttctttcttcttataaaaatccttgagattcatctttgcatatttttctgactatttcctagggatcaatgcctataaatgaaatttgggaccaaaagttacgcaccttcattggccagttgcaaaattgccctctagaaaagttgtaccaacgaactcacccaagaggtggggttctatttcatgaaatgtttctccaccccacatttccttttaatccacaccctttggcctttattaggcttagacatctcttcagaatccgtgcttcctacatcataatcttgggattcaatacatgtttttcattcgggttattattaatatcagatttatctaactatgcgtgaacccagccacagccttagggaaagagatgtatctttcagtgctgaagagaataaaaatgaataatcctcagagactttgaaactgaagtgggcaggcaagggtggaaagaacagatctcattctacgaagtgcatggagggatattcacagagcatgtagtgctgagtagagcggaacaggcacccggggacacccagagagcagcctttcctcaacagaaaaggagtgagcaccacacagagctgcagaaagggaatcccagacaggggtaacagtagatgcaaaggccccatggcaggcaccaacttgtccaggtttgcccagaactttctcagttttaacactagaaatcccatatcccaggaaaattctgagtctcagccaagctgggatgatttgcctgaaactgccctgttataaaactgagaggtctgtgccccatgaccctcctcagtcctgagcaagctgaggcagtgggtcgccctagactggaacgacatgcatgatggtgggaagagccagtgactctctttcatgtcctctctcccctcaacctcaggagtcacccaggtgggcactggcatccaggatgaaaacttcccagcacccctagcagcaagcagaggccacgtgaccaggcagtgaccaatgcacatgaggccagtgcacagcaactgccattagaggaaggaagatttgtgtcctcttgttctcttctcccctccctgctggctggcagtagataggatggacactgtgggggaagctataccctaaggaagtcagagcagcaagatggaagtagcctaagaccctgaaaaatgcacagagaagaatgacccgactggcttggactttcatgtgaaaggaatgaacctctgtcttagtaaagccaccgtcattcagggtccttgtcacattcactgaggctgtaacataattgttagaaagaacaggagcgggaggggggatggagtcggagaggcaggcagaggtcagatcacatcgggcccgtaggccaaggcggaggaagaaacaggcaacataggactcaaggaccacacctgctcccaggcaaagggagtttgctgtgggtgcccctctctgtctgtgtgtccagtgtgtggatattctttataccttgcccatattgtacaaatacttttttctattcaatatttagaagacattgcattaaatagcaagatggcagatgaacatcaggaaggaacattagggacatccacagtgttccatccaggaaccttcaccgtggaaacccttgtgctcatgggcgtggtctcaacacacagtcagctgttggggatcagaggccgcactcaccggagcagtgaggcagaactaactgggagagggtccttctgtgacacctactgcatcaccgggctgtgtgaagtgactcagctgccagaactcacacaatatcattctacaccaaaacctcatgggaaaaatggtaagttctcagtttctccattaatagcaactctcagattaatcgctgtcctccatcgcttctccatgaaacaactttttatagctttgcttgcgtctatttttccattttttttaattttgctaactgattgaaagatatatattgtgtgtgtgtgattttgtctctgtcagccaggataatcatggtttaattcttattatttttattaccaacatcctttagttttttaagcttttcaattcctaagggtattaatcaagatctttctgtctcatgagacacagaaaacaaatccaaactgtgtaagaggaaaaagaatgcattcatcactagcattgaggagttcccaagcttagcttgcttggggtacagctacgtctaccatttccagggtcatcctgtaactctctctctctgcttccccaactttggctccatgtttagctccacgaccctcaggcttaaacagctgtactggccgctccccagatctccagctccctgaccctcaaactccaactgcagcaccagctccgccccgggtctccagctccacaatcctcaaactacaacagcagcaccagctcccctgtggatctccagctcaatgactctcagacttgggaggcagcaccggctccccaccaagcctccagctccacaaccctcaaactagaaagcagcaccggctactccctgggtctccagttccctcaaacttcagctatagcactggctcttccccgtggccaccagctctgcaaacctcaacttacacagtggtagcaccagctcctccctaggtctccagctacacgaccgtcaaaattgaactgcaacaccagctcctctttggcctccagctccacaatcctccaacaacaacagcaacaccggctcctccctgaatctccagctcaacaaccctcagacttgagaggcagcaccggcacctccccaagactccagctccatgaccctcagatttgaacagcggtagcaccagctcctgtccaggtctccagcttcacgatccttaaactagaacagcagtaccgccgcctccgtaggtttccagttccatgatcctaagacatgaatgaaagaactgggtcaccccagggctccaactccaagacccacagatttgaacggcagcaccggctcttcctgggatctgcagctccacagccttcaaactagatcagcagctccgactcctccctgggtctccagctacacaatcctcagacatgaacaatagcaccggctcctccttgggtctccagcttcactactgtcaggctagaacagcaacaccggttcctccctgggtctccagctcaatgactctcagatttgaaaggcagcaccggctcctcacaaagtttctggctccaaggccctcaaactagaatagcagcagctgctgcatcttgggtctccagctccacaaccctcaaagtagaaaagcagccctggctcctccccgagtctccagctcctcaagtctgagggttgtagagctggagacccggggaggagtcagtgctgctgttctactttgagggtcgtggatctggagacccagggtggagccggtgctgctgttctagtgtgagggtcatggagctggaagaccccgggaggagctgctgctgctgttctagtgtgagggtcatggagctggaagaccgcgggaggagctgctgctgctctcctagtttgaaggtcatggagctggagacccggaaaggagccatttgaacagcagcactggcccctccccaggtctcaggctccacgaccctcagacttaaaaagctgtagtacgggcttctccctgggtctccagctctacaaccctcagacatgaacagcaccaccggctcctccccctgtctccagttccacgaacctcaaactacaacagcagtaccagcctctccccaggtccccagatccacgaccctcaaaatagaatggcatcatcagctcctccctgggtctccagctcccaaaccctcaaacttcaacggacacagcagatcctccccacagttaaacagcagcatgggctgttccccaaagctccaaatccatgaccctctgacttaaatggtggtagcaccagctcctccctaggtctccagttccatgaccctcaaactacacagtagcaccggccccaccccaggtccacagctccaccaacctcacattagacactaagactacctcctccccactctccagctacacaaccctcagccttaaacaacagcagcaccagctcttacctgggtctccagcaccacaaccctcagccttaaacaacagcagcaccagctcctccctgtgtctcaagctccacaaccctcagactagaaccgcacccctcctccctgagtctgcagctccatgaccctcaaactaaaacagcaacacaggctcctccctgaatctccagctcaacaactctcagacttgagaggcagaaccggcaactccccagaactctagatctgttcagactagaacagcaacaccggttcctctctggatctccagctaagtgactctcagacttcaaaggcagcaccagctcctccgtggatctccagatccacaacattcaaaccaacatggctcctccctgggtcttctgtttcacgatccttaaattagaacagcagcaccatcttctccctgggtctccagctccacgaaactcaagctagaatagcagcaccggctcctctgggatcttcagctccacgaccctaagacatcagtggcagcaccggctcctcccctggactccagctccaggaccctcaaacttgaacagaaacaccagctcctccccaggcctccagctccttgaccctcataaacaatcccttctcatgaaatgtagcagtcaggaaaactgtagaggaagtaaataaataaatgttttcctttcaaattgatgtttcttttctgttcacgcaagtcagaaaacttttctactttccatcaaccttgcaacctgcttgcattcatttgtaagatggaaatccatcatttgaaataacctttaaaaacttagtagttcttttttactatgatcttatctcacagctctagaaacgatctttcactttgcctgtgcagaagtcttgtgaacattcaaactatgaatttacttggttgagattcctagaatacacattatccccagatgttcctgcccttcttaaaatcttctaacacgttcccctcacccgagcatacgtgccaggtcctatccacagcccacagtgcccagcacggccctgccctctgccctgaccttatggtctcccctctgctgttactttcctcccagacaggcctctgtcacttcctcaaaccacacaggttcaggcctgactccgggcctttgcccctgctgtgccccctgcgtggagcgcctttccccggctccccatcctcctctccaccggctcagctccagcctgctggctgcccctcagtccatgaacacacgaagtcctccccccaggcctttgcacatgctgttctctgtgcctgaaacccttcccccctcaccatctgcgttcacttttctaatttccgttcatccttggagtctcccctgaaatatcgccccccgcctgcccccaccacttggacttaaccttgctcaggttgaaaacccccatctcctgactccaggaagctagatgctatcctggcacttggaactttcccatcacagcgttttgcgcactcgtaatttattctattaggttggtgcaaaagtcatcacagttttgtcattgcttttaatgaatggcagctccggctcctcccgcttttgattgccattacctttactggcaaaagccggaattactgctgcatcaacctaatagaataatttatatttattcacctatcatctgtcttcccctctagaaagtaagctccatgagaatagggaccaaatctactccaatcactccaccttcctagcacattgtcaataattattcaccgactgactgatggagaaatatcttcattgttgctgggatgagccacataacatgacatgcccctttgaaagtcaatgtcatggacagttagcatttgcttttcactcctgcacctgtggcttggctgggcttaggctgatctagtctgggcttgactccaggctgagggttggaaccctgcgtgctccacacgcctctcatcctgcagctggagccgaagttccctggggcacgctcgtctcgtgggaaaaatcaagagcattagagggcaggcctggcagtgccaacacattccaggcttctgcctgtgccgtgtctatgaaaaaatcttgttggcataagcaagttacccagccacgagcaatacctatgggatggataagtctatccaccctccctcgggccctggtaaggacgtggatgtgtcatactcttacaggggtagtgaaatagtgaggcccaacattaaatcacctacagcaagatacatcagcctctgtgtccccacgctggaatcatgtttcaccagcgggtttacctgagctgactcccctttgcaatggtgcctgcaggtttaggccaatgctgttccttgtggaagacagagaagcctcagttggcctctgactgttggcaagaacaacatattaagttggcacaaaacaaccagaagccccaggtggcccgtgcccagtgagataggagaggagcaggaagaactgtggaagctcagggaggctctcatccccagccccctccccactagtccccatctctgctttctttttcctgttttttttttttttttttctttgagacagggtctgactctgtcacccaggctggagtgcaatgttgtgatcttggcttactccaacctctgcatcccaggctcaagcagtcctcccacttcagcctcctcagtagctgggatgacaggcacatgccaccacacccagctaaatgttttgtttttgttttgtagagacggggttttgttgtgttgcccaggctggtctcgaactcctgagctcaagcaatctgcccacctctgcctcccaaaatgctgggattgcagacatgagtcactgagtccagcctgctttattttttttaacagtacttggaaccttctaatgtactaagtacacatgtattttcttttttttcctctcttccctagaataggagcttaacgtgggcgagtatttttgtttatctcatttatcaccctatccccagtggctggaatagcgtctggcacatgaatggtgtgttctaaataaatatttttaacaaataaatgaaatatcctacaagagaaagctagtatttggaactcacccatcaacagaaccaaaaagctgaagaccttcagcctgtccctacctctgaatgcacccagccccagcagattaaaaacaggaacaaagttggggaagggagcaggtggtgccaccccgaccaaggacccctgaggcttaggctgaatttgagctggagaagggactaacctaggaactgggcgtgagattaaagttgagacttgtctggcctggattttgtaacaccgaaacatgagctattccattcatttttgtttttgttttttttgagacagagtcttgctctgtctcccaggctggagtgcagtggcatgatctcagctcactgcagcctccgcctcccaggttcaagtgattctcctgcctcagcctcctgagtagctgggattacgggcacccatcactaggcccagctaatctttgtattttcagtagagacagggtttcaccatgttgaccatgctggtctcgaactcctgacctcaagtgatctgcccaccttggcctcccaaagtgctgggattacagacatgagccggcgcctggccatattccactcattattagcaagtctgctattataaatcaaggtgaccaaaatcctaggaaaacttccccagatgtcatcaaggagcagagaccagagacctatcagcaggatggggactagggcgaggcaggggagggaggcgctcatctctggattatcaggatgcagcaaatgaggcataaaatttaagggggcaccaaaaaattcacggatcaaaataaataatattttagtgcagaatttttttcaaaagttaaattcaatgcaaaaaaaaaaaaaaaaaaccctaatgggaaagttatcaacatttcaactaagacacaatttgaccctgtatttgcatgacttggcctcactcactcaccctaatctggcccctgcctcacagaagctgctggaatgcagcggctagagaacaatgaagctgttttctgctcctatccaattcagaccttccataaagcagctacaggtgaaatcgtgatgagccgcctatgccaacaggaccacaatctaccattaggaccacagtgaccgggtccatgttgcctgtccccagctgtgcccggacgctttggcttagaggctcaggccagtgctgcttctcccgttgacaccgggcactcatgaagagaaaacagacaaggccgggcacggtggctcatgcctgtaatcccagcagtttgggaggctgaggtgggcagatgacctgaggtcaggagttctagaccagcctggccaacatggtgaaacccccgtctctactaaaaatacaaaaatgagcaggcatggtggtgcccagctgaggcacaagaatcacttgaacccaggaggtagaggtcacaatatcgggcagctgcactccagcctgggtgagaaagtgagactctgtctcaaaaaaaaaaaaaaaaaaaaaagagaaaacagcctcggttataggaactcaggcctccacacagacacaatcaaggagcttagttatttaaaacgcagctccgtgtgggggtaggttggggaatgattcttattttctactttattctctttctctgttacttggcgtctctggccatgagcccgtcatttctgtaattagagcacagattgtggggaggggaaggacaggccgcctggcaatgtggtcctgtttttcctggaccagcctttgtgtgaggacctgtgcccagcgggcagattcgggtccctgaggaaagaggaggagccaggtagtgggacatttgaggtgacagcccttccccagctgtccaaggcccgcttggcaccgatggtcattcccagcatgttgggttggccttcgggggtctggtcaggactctcagggccatcagggtctggcaaaccctggtctgggtgtgaagacacctggggcatctagaccccctctctggccactcacacacccagtactgagaggccacagcacgtctgcccacgcctctgtccttgttcacttggtggctggccagtcatcgtggacactgaccgtagctcgagtgtggggtcctcaggtttctgctgggccagcaattgtgccccttgtgctgctgtatcttggggtgccagtacggggtctccatagggatagagacagcatctctgcaccaaccagtgggcacacagctgtgtttcagtacaaacacctgggccagctggacaacgcagcctgggctgagcagctctgatttgcctgaatcccagagttggcatggtggggtcattctttccagccaaaccagagagcacgtccttgggcaggatgaggagtgctcagagcaggtgaatggagctctgcagggaatgacatctcctccaagaagtgagggccctgaaatcaatccagggacactctctgagcatccccagggtacacaccaggcctcagggagcagggaaatgtcagccagcaaggacaggtctgtgctctgtggatgggccagaaagagggggtgcagcaaaggaatcatagtcgcagaggagaaaacggccagagtcacagcctgatttgtccctttctcactgggtgctgccaggagtccagtccaagccaacaacccccgagcacaggtatcaaaatggactgagaccctctaatcgcctcctggtgtcttgagatagcctcctacccactggcccccaacgcggagccctgcactggcttctccaagaagaaactggggggctgaggggctgacttgcggggacacctttcattcagtgcccgagaacctgttgaatgtttaacttatccttaaaaaacatgcctgcctctttgcatgtctaactctctgtaaggagcatgtgttactttgctaaagaaggaaaacatcactccagaccacctgtgcatttagcaaacaccaattcctagcccagagcagatttgctgcttcaaaaaagcaaaagctcaaaacccatgtggagacttcagaggccgcctggcccccagctcaccctttggaattcactgacaggtgtgtttgtggctctttcttcttggcgtctggtgtcaggaaagagaagacacagggacaccagttgggggtttaatcccatcagacccaatctttggttctctgtgccccttaccttatccccatcgagacgtcgctggagctgaatgaaccacgagctgctgccctgagcagggagttgaatccacccttgatcagatggttgaagctgcgcacaccctctagggccctgcatggagatggggagtcacacctcggttttatctcacagcaaggatgacccctcactgggcaccccagctcagacctcaagggaaacaggcccgaggaaagatgggtggaaggatggggcccctggtgggaggactcacagggtaagagaccccacccactcaagcgattcacactcagggtctttggggctctcagaggaaacattggttcacagtgaacacagttccagctattcagggtcacaattatctgcagcaggcacaaccacccactctcaaaagttgaattcagtaaggcagaaacttaagctcaagatggatttttattgaaaatgatttctgtaatcatgttttatttacctgtatttacagattaaagtttgaatatggcaccttaattccttatcaaagagaaagaatgcatatcttgtggtaatggggaccagcagctccatgaatcgaagttttctgtggcttgatctagttcagagtctgagtgatacatgtgccagcaaaagcctctggtaaacagggagcagcgttacagccagcagagcccaagtgcttgcggagctgatggagatttaagggagcaggttcgagctcctcctgaggcggagtgagaggaaggctctccccatctcctgagtgtcaggctggactcaaaggggagagaaaatattttaaataaacaaaacactgtcgtcgcaataaaatgtgacaattctcttccctttcctttttttcttttcttttctttttttttttttgacacaggttcttgttctgtcacccacccaggctggattacaggggcatgatcttgactcactgcagcctcaaccttccaggctcagatgatcctcctgcctcctcagtagctgggacctcaggcatgtgccacgtctgtttttttttttttttttttttttttttttttagacatgaggtctggccacgttgtccaggctgatctcaaactcctgggctcaagcaacctgcccacctctgcctcccaaagtgctgggattataggtgtcagccaccacacctggctcccttctctttctttttcacctgacagtgtctctgcatccccatctcttagcactctcctgacttcttagataccctggcctcatctctgatctgcctgatctctggccttagcacttgctgttcctcccacctagcacactgttccctcaaatcacccatggcagccccttcttatccttcaggactcagcccacatgtcacctcctcagagaggccttcccagaccacccaaaatgagacagtagctccacccccatgactctttatcccatctcccaatctgtgtcctttgttgtatttttcacagtctgaatgatgtttatgtgttgacctgcatgctgtccatcctcatagactggaacttcctgagagtgtcatgagatcagatggctcttactcaccgctgtgtcccagacaccagcacagcagcctgtgtttaaaggtggtccgtcaatgtttgttaagtgactggacagatacggaagtggacggttacactgacagtttttacagggggacgtgttgctttgcctttgacttgttccattgtcctcgtatgtaacgtgggcctgaccgggaagaggtggtgcctggacatgacgaaaaactttcacacgatctgtcggacaacaaaccacataagtatcccttctctatccgttattctataccttcatggataaatcactagacctcacgtgggcacaggaattttgaaatatatttttaaacaaattgctaatgtagacagcgatcctaaaatatagagagacatatagacattcacccgagccctgcacactctacacatgactttgcaatccatccttcgaggaagtctgcagtgaagacggcccttcagaactgcgaagaattgagtcaaggggctggacctttagacccctgtgtttactactagtctttggagatggagggaccccaggaagggtgactgggcaaagcagctcctgtcagccaggggcattttctggggagggtctcagctgtgagctctcagcaggcaaccccctgggcagtggggcatgcgtgcctgctcctgaaaggggatgtgggggacacatcccagcatctgctccaagccatgagtctttctcacccgggccattgtgcaaaagcttcccgacaggcctcccttcttccactcttgccctatttacctattttccacacagcagccagaggaagcctgtgaaacccaggtcaggtcctgtgcttcctctgctcagaactctccatggctcccgcgtactcagagtaaaacccggagcttcatgataaccatgaggcccgcagcttctgcctccaaggcttctctggcctcacctcccgctgctcctctcctcactcggccgcagctgtggctccctccccggttttccgggaacatgccagcacacctgttgctggctttgtactcactgtttttttgcctggaaggctccaccctcgatgtcatcctggcccgcagcctcagctcctccagtcttggctcaaatggtggcttctcagcagggtcttccctgaccatcctactgaaaatcaacaaccaccttccatagggggctgaacaagggccccccatatgtgtccacattaaaacccctgggccctgtgtgtatgtccattgcaaaggcgctttgctggtgtaaagtgaaggatcttgagatggaaagatgactctggatgacctgggtgggcccagtgtaatcacagggtctttataagaggagggcaggagggtctgagtcagaggagctgtagtgacagggcagagactggaatcatgtgcttgaggatggaggaaggagccacgctcccaggagtatgaggggctcaaaagaaaatacaggccagaccagcactttgggaggccgaggcgggtagatcacttgaggtcaggatttcaagaccagcctggccaacatggtgaaaccctgtgtctactaataatacaaaaaacattagctggacctggtggtgcgcatctgtagtctcagctacttgggaagccgaggcaggagaatcacttgaacccaggaggcagaggctgcagtgagccaagattgcaccactgcactctagcctgggtgacagagcgagactctgtctctaaaaaaaagaaagagacaaagacagagaggaaaaaaaaggaaggaaggaaggaaggggaagggaagggaagggaagggggaagtggaaggggaaggggaaggaagggaagggaaggagggagggagggagggagggaaggagagggaaggggagggagaaagagaaagagagggagagaagaaagaaggaaagaaagagaaagaaagaaagaggaggggaggggaggagaaggaagggaagggaaggagggaaggggaatgaaagggaggagaaagagaagggagaaaggaagggaggaaggaaagaaaggaaaggaagagaagggaagggagaaagaaagaaaaagaaagaaagaaaggaagaaaggaagaaacaaagaaaggaaggaaagaaggaaggaaatacagacactgaaaatgcaaagagtcctgccctcagggcatccagcaggagccagccctgttgacaccttgacttagcccagtgaaactgacggcagactcctgacctccagagctaggagagagtccatatgtgttgtgtgaagctatcaggttggtggtgattcgtcatagcaaccacaggaagctaacacaccctcccacatacctggagcttcctatccccaagcctgctgaatgtctccctgtagcatggattagcagctgacatgcatacctttcactgatttgtttatccctctccacttactgaatgtgtgctccataaaagcaggaattttgtttgttgcaagatcccctgcacctagcacagtgcctggcagatagcaggtgctcagcaaacatcctctgcaatgctgcacttgagtcctgaggagggagacggagcagatcctgggatgagccaggggacagagctccaggcagaggcagcaccaagggtagagtctgagtcacagccaatcccatccttctagatggctgctgtaggacccatggataaaattcctcctagccctgcctccacagagaagtcccttcaactgaagccatggaagctggaaactcacttaagagcccctacagtgagagattaagagcatagaccctgaagccaggctgcctaggttcaaatctcagctctgccactcactagctgagtgactctgggctaattaattaacctctctgtgcgaatttcctcgtctacagaataaggataatgatagtgcccatctcatagggctattgtgaggattgaaatagctaatgcatttagcacagtgcctggcacacagtacacatgatctactgttcctatttgggtggaaaagtccagcaagttgcaaagattgctaaaaagcaatgagaatataccagggtgtctaaactgacaagcaaagggtatgattaaaagacaagccaggttggcagcagaacatttgctttccttggcctgggccacagacaaggaattgaaaggtagcctggcaacgctttgagaaaaattaatcacccctgttgcctgcctgcccctgcccatcccatttaacctgcattcccccgccccctaccctacccctaaagggatcctggagcctcctgttgcacaggccgggctgtgacatccacaacacaccccagctgggcccagcaagttgttttccagccccatctgcccagacacagccctgtgaagagagggccgaatgcagagccagggctgtgttgactgcagaagggacggaagaaaatagatggggtgcggtctgcacagtgggaggttggtgtgtcatgtgggtctcacatgtggcttccctccaacaagccccctgcaatccccgccagacgtaaggagggaggggtgaaagtggggtttccgccagaggcagcagagctgaggaggggcccaggctgcagggacctgtgtacagggcatgagatgtcaccgggggcttcctacatgagatgcagtgagtcatcagggtgcagggtggaggctctgaaggaagagcccaggggaatacaggaaaaaggtgacctgagaatccatcagccaccaccccagtccttccctcctctgtccaggagcagggccagggcccaggagacagggtgagctttctgcaggagggacacccgccctgagaggaacctgggctgtcatagccgcacagacactgcaagccaggagcagtggccacacccgtagagcaggggtatcagaagggggcagaaacacaagcttgtcacctgagggctgggagcatctgtctttgtggtgaccaaggggagacaaagcaagtgacggagacgccttctcttcagcagtggttccctctgcaggtctccagggacagtgggtctgaggggcaggaatggtggggggctgtcatgggtgccgcattaggatgtccccttctaccctgagcagcaggcagtcccctcgaggattccacgtcatcagcctctggcccgagggcttcccagcgcctccctttctccgttttgggtgacttgggcaggcactggcgtctacatctgtgcactcttggcacctggtgggtgcgacctgggccctcccatcagacacacttcaatctcatcccacacagcccagggccagaccttggcacctcatgcagactcagactacgcacctgggatccgggcactgagactgcacgtggcctcttcccagtgtctcagagggaaatgaggctggaatttctcctgggacactggacaccccgcatctcatggtgctgcataagaggatgcttggccctgcatcctccctgcaataaccatcatttaatcaggccagaagaagtggagaaggcgcggcccatgggacagccatgtgttcaaaagcagcccccacccatgcacaagcagccctcagaggtgtccaggcagctccaaccagcagataacgggcacccagaatgtgcagagccagcccagattgcagcctggatctcaatttgcaagaaagaacttgccagcttgagcagctgccacgagtcccagcggcttggcagtttctcctggaggctgttcgcagagccagaccagggacggggtcttggccactatgggtccccgcagtctgcaccgagcttggagtcaccaggctgatttcacggatgtttatggagcctgcaggagaccatagcttagtgtgtcccctgctaattaaaggacaacagccagttgttccccgtcagagattacaaaggatgaatgctttggacccagggagcggatgggagcatatcagatgccaaaacctggtgcctgccacctggcattctttggaagtgaccctttgtggagcattggccattatcggggagatgggtattggggagcctccctctcagctctggggtctcaactctgcccacatagggcaggaggacgatgtcctgaagctgtgcctgtccttgcccaaggagggttgggggctttgcaggggggtatgtgaatgcctgcaggcctaggggtcaggggacccgtgcagggctggaagaggggttctcggccacaggacagccctgcttctgccagtgaagccatgtgtggaaatacggctcagcattgctcaaccttccagcagccaggacaccctgggtttgagtccctgctacagataaaagaaccgaatctgaccatttgtctccagccattctcagcctctgcctctctccccagcccctctaccaggtgttcaaggaaagcagagcccagaacctgtcgtgtagggccttgggctttccacggcctgatcagtgctagtctctggggagcactttgggggacacattcagattctctcgaatgcctcatacccggactgcaatcccccattccaccagcgatttcaggaccatgtgggaaatttcatcaaatttgcaagtgtgttgtttcttcttttacccccattctatctgtgagatgctctagaattcaccagatgtaatatatctttgggatgaatattctatgttaagtcctttgaaagcaatcaacaactgtaatccaattactattggctgtatctttctcttttgccccaaacctcatcctgtgtgccaagctcaccacacacacacacacacatacacctctcacaacagatgctaattttgtgcctcgctgcctcacataacgtgagagcgttgagtagtgaacagctgatctgcatgaattaacgtgggaggtcatgtgggccctgaagctttcacactcacaaaccagtagcaggatgggttgtcatggagatcacatggagggacaccagagttcccccaggactctgggcctcctctgatgagcaggtcacatggggatctggggggaggcacaggcacgaactgcatattaaatacacctgactcactgtgtctgtgagtgcgtgggcgtgtgtgggtgtgggagagtgcatataggagtgagcatgtgtgtgagtgtacatataagtgtgtctatgtgtgttagtgtgtgcatatgagtgtgtctgtgtgagtgtgtatgtatcagtgtgcatatatgcgtgggcattgtaggcacacatgtgcatatatgtatatgtatgagggtatctgtgtgtgagcaaatggatgcatgagtgtgtgtgggcatgtgtatctgtgtgtgcatatgtgtaagcgtgttagtttgcacgcatacgtgtccagagcccacatgggatgaaaactgaatggctctaaagatctactggacacatttcagatcctaacagagctcttaaagctccaaggggtcactgaatggacaatgagtgtttctgagtccaggtggcactgactcagcaatgcaggaaggcagctccttgagttccaggaatgacctgcaccccttttctctccctcccggtcacccacccctccccacgtcccttcctcttcctctgtttgccttccgtgcctctccctttcccagtctcatttcttgcatgttcatcacttctacttcctgcagttcaattcccctccacccctcagcatggactgtgggatgagagagccacagccttatccctgacgtaaccaaaactcttggcaccagcttagacctgtttttcagtcttataaacaggtctcaaatcagggaaatgtaaggttctgaggaaaatgatcaccaccaggtgattcccctctgtgttaccgtaaggcggtgagacagagattctctaacgtttttagtgcaacccaccgtaagaaacccactgcaaactgccacccagcacacacacaagcacatccatttatacagaaacgcagcacgtttccccaaacggcactcacccccgctgcacacaatgcgctctgatgtctcctgacctagtctatcctggtctattgcagattttcaatgcggggctcgacactctaaattgatttcaagacccactaatgcatcacagcctgcgatttgataaactccacgctaagacacatcctgtagtgaggtgttcgacccagaggccatttatcctgcagcgagtggggtgaggaggaggtggggaggcaggattaaccctgaggcacccctcctcctgctcctcccatgtatttttggtagagatgggttttctccatatcggtcaggctggtcttgaactcccaacctcaggtgatccacccacctcggcctcccaaagtgctgggattacaggtgtaagccactgcgcccggcccctcaataggtagtttttcagcctttcccccctcccttcttttcccctttagtaatccccagtgtccatcattgccatgtttatgtttatgtgtagccaatgtttagctcccacttataagtgagaacatgttgtatttggttttctgttgctatgttaaatcacttaggataatggcctccagctgcatccatgttgctgcaaaggacgtgatttccttctgtttcatggctgcatactattccatggtgtatatgtaccataacaaatgtctgtttcttttccctgagtctttttgggccccatgtagaaggatctgcaggaaagttaaccagcaacagtgtcaggattggggaagggcaaagctcacagggatcttggctggggggatgctcgggaagcccccaccttcagctgggcccagggctcaggctgaaagagaaaaatggagttgttcctggaaggcttggcagtggagaggacgagacattgctagatcactataagaaggtgataaatgcttgacccggctcaaagtgttttgtgccagggttatgttctgagatataggagggttaactaagctggggctgtggattagttatctattgctttgtaaataattacttccaaaacttagtaacttaaaacaacaaacttttattatttcatatgtttctgagggtcaggattctgggagcagctgagctcccagaatccgtcacgaggttgcaggcaagctgttggctggggctgcagtcttctaagacttgtaagagctcgaggcagatgggcctccaggataatttacgtggctactgggaggagtttttggtccctaaccacatgggcctctctaccacatggcttctgagagagaaagagagagagagaggatgaagatggaaacggctgcctttataacctaatattggaagtggcacatcatcacttctcccaaatgctcttggtcacccccaccaaatatggtaccacatggtgggggacagctgagttccagaaaggagggctcactggaggccagttaccagaggctgggtgtctctcactgattcaatcttttattcaaatactggcctggcgcagtggctcatgcctataatcccagtactttgggaggttgaggcacagggtggcaggggttggggggtataactaatccacagccccagcttagttaaccctcctatatctcagaacataaccctggcacaaaacatgctgagctgggtcaagcatttatcaccttcttacagcgatctagcgacgtcttgaggtcaggagtttgagaccagcctggccaacatggcgaacccccgtctctactaaaaacataaaactgagccaggcgtggtggtgcgcacatgtaatcccagctactcgggaggctgaggcaggagaatggcttgaacccaggaggcagaggttgcagtgagctgagatcgcgccactgaactccagcctgggtgacagagcaacactgtgtcaaaaacaaaaacaaaaacaaaacaaaaaaaacccaacaacagaaaaacaaaaagtatgtagtgagctcctgccacaagcagagcatcgctctggtctctcagaagtcaacaggaaaatagacaatgtccctgcctcatggagttcccactggaggagtgaaagagacagacaagatacacgtaaatgtctaatacctttcgttggctctaagatgtgcgttttcctgcatctttaacatctctaaaattgccatctatcttatgagttgatgctgtgtcatggcacatttgacggtgttttaaatcttcttctcttcagggtgggacaggaaaacctcatgaaaaagaagaactggggagagttaaggaagagactgttcagcgaccatgagcagtggagctgggttgcagggaccaaggtgggggtgctgcccctgggacaagccccagcctcccaaggcctgaaggggcaagaggaggaggtagtgtatcagaacctggttgaacgtgagccaggggaaggggctgcagaagctgcgggtgttgagaattgcagctactgccaacgccacagctgttgcctggcaccctggggcaactctctttactcccgtcctgtatcccctgccagagtgcctgtgggctgaagccagggaggctgggggaaggtacctagaaaccaggctcctggggcatcaagtaaggtgaataaggggtatggagagaaggtaaccagcttttgggataaaggcataaggagagagggatatcccaagaggactgctgggaaaggcctctctatgaagtctcagctaagacgcgggccatggaaatgtctggggagaatgtcccagagagggcaggacctgagtgggccgagcgtgggctgcaggaagctgaggagctggtgggcctgggtggagtgggcagtaggaagagaagtcagggatgaggtcaaaaattaggtagattctggaccacgtgcaggaccttgtgccatggtgaggagtgtggatttgactcaagcatgacagagccgctggggggttttgagcagagagaggacgtgatccaatgggtttaacaggagccctgtggctgtcatggaagaaatggccccataaagggtgagaaggaggcgggggcagtgaggaggctctggaatattccaggcgaaagatgagggtggcctggtggtccagggtgggatggtggaggtggggagaagcggtgggagtcaggactgattttgaaagtagagctggcaggattttctgatcagttggaagtgatgtgagggagaaaggagtcaagagcaaatccaaggtcacttcgcactgttcctatggagatgctccaaacatgggacttatgagctgtgatgaatttataattaagagtatgtcggcagatgcctcaagcttccaggccttctctagaatgttctcatgatcaaaaaacttgagcaagacccacactcatgatgttcacccctcaacccatgaagtgcgtgctgcaatagcccacatgtatcactggagtcctcctgtggccatgtatgtgctgggaggtgatcaagctgcttgctacaaacccaaagatgtcggcgttgggggaaatagggttgagacaggaagatggagcctataaggatgaatgagcccaagaaaggtgtctagcaccctgtctacagagggaggagggccttgtggttcctccagcccctggctgggtgaagtaacatcacccagaccctgctgtggtcggtcagttcaggaggaggcagggccacaggtgagcctgtccagaggagcaggtgccatgaggcccagagaagggaggtcaggaaggtctaccaggaggagctaacatgtgagctgggctgggctgggcagggtaggtgggagagagaggaaggaggtcccaggaggagacagcaggacaaggacatgcaaaggtacagccggcaaggccagagggaagtgatctgggacctgatccaggatgatgggactgtctagagcagcggtgcccaaattttggcagcagggaccactttcatggaggacaatttttccatggactgaggtgggggtggggatggtttcaggatgattcaagtgcattacattcattgtgctctttgtttctattattattacattgtaaaatataatgaaataattatgaaactcaccataatgcagaatcagcgggaactctacacttgttttcctgcaactaaacggtctcatctgggggtgatgggagacagtgacagatcatcaggcattagattgtcataaggagcacgcaacctagatccccctcatgcacagttcacaatagggttcgccctcctatgagaatccagtgctgcttctgatatgacaggaggcagagctcaggcgttcacctcctgctgtgcagcctggctcctaacagtccacaaattggtagtggtttgtggcctggtggctg[450 bp omitted]atttgcattataaatctcttctaatattaatttttaaaattcatatgtttcatatgctagttttatttttgtctaatgtccgagtactcttatactattaaaataagcagcacaggctgggtatggtggctcatgcctgtaattccagcactttggaaggccaaggcaggaggatcgcttgaggccaggagtttgagaccagcctgggcagtgaggccctatctccatttaaaaaaaaaaaaaaaaaagcagcattcatttgtgaaagaaccaaatcatctttggaggtatgtgtaccttgttttgggaaaccctgtatcataactaatgctcctttctatctggaggatgatgtagactgattatttgcagtcgcttttagcaaagaacacttgctgttcactggaatcatttgcagaagaataggggtggctctgccgggagagaagcatggggaccacccgtcctcactggctcagaactgaggggtttcctgggatatgggactattcgtgctaaaactggagagtttgaggcgatcctggatagttggtgaccatggagaggaagttggaggatcagagtccagcccacctggttttccagccctcactatgtggcagatatgaggatgcttccttggaccctgatacatgaatgaagggggcctgcatcaggaaagcgaggtcagtgtatgatgagtgctgtgggtgggcacctccacctggtcagcttctggggctgcaaaggctggaaagctgaaacctgcatttcccaggctcttggacgtggaggagttgaggcccccgcttcagtgagtgcctccagccgggggcacagtgggaagggttgggtcttctgcatcagggttccagggcatggccattcagtttgtgggtttgttccagggatttaggagctgagccggggaaaatctgaccatgaggtggcagtagcacacactcgcttcactgggcagtactttgacaggtttgcaagcagagaaggtccctcgcagcagaagccagggagggcaagggaagtctgggggcaggagcttgtgtgacgaagtgatgtcgttcagcagcgtagcccaaggagtctctggctcagggtgctcccaagggcagagatcatttgggggccctataatggcaaggctttctatctttaatgcatgagtaagagctgtcacgtgaggttttgcagggtaggcaaagcaggcaggctctaaatggctaaaaatctctttgggttatttaaaaaataatcaggtgtgtaaaaatttgagtttggcaccagtgggctttcgaggtaatggggctcagtttgctgtgaagaaagaaatgggccaggtgcagtggctcaagcctgtaatcccagtactttgggaggctgacgggggcacatcaccagaggtcaggagttcgagaccagcctggccaacatggtgaaaccctgactctactaaaaatacaaaaactagctgggtgtggtggcatgcgcctgtagtcccagctacttgggaggctgaggcaggaaaattgcttgaacctgggaggcagaggttgcagtgagccgagattacaccactgcactccggcctgggcaacagagtgagactctgtccaaaaaaaagaaagaaagaaaagagaaagagaaagagaaagaaagaaagaaagaaagaaagaaagaaagaaagaaagaaagaaagaaaaaagaaagaaagaaagaaaaaagaaagaaagaaggaaagaaagaaagaaagaaagaaagaaagaaagaaagaaagaaagaaaaaaagaaagaaagagacagcccaggggccaatcctcagaggttatatttggctcctctgtgtaacagtggggtgggggtgcattttggaggcagctgcttcttgacccctggtgtgttcttcaactcagcagttcctcctcatgctccccaaccccacagcccatttctctggagtgcctggctatgtggtttgtttacgtccctggcggatcagttccggggtcctattctgggtgtctcttctgaggacccagactgcagcctgtgcccctgcccttctcatgattttggggggatcctagtcccctgtattcaatccctttctgcctaacatggctaatgttgttcctggtatctggaactaaaccctcctgagacaaataatggctgacatccggtcttggtgccagggagacagcggccagcaccgggggctctggagggcttgggagggggtggcctccactcagctcctgccatgtagggttggccagtgtctagagtttcaatgaaagagattcttatgtaaaataatttgagtcttgaatgttggctcatttaacaaaaacaaacacaaaagagagagggccaaatgaaacatgtctgttggtgagggtgctcatctgcaagggccgttgtaacccagtaccctggactgggcgctttgacagcagaaacgtattgtcctgcagttctggaggccaggagtctgagatcaaggtggcagtggggttggttccttctgagaactgtgagggaatgctgtgttccaggcctgtcttcttggcttgtagatgggccatcttctccttccatctttcctctatgtgtgtttctgtgcccaaatttctttcttcttcttcttattttttttaatgaggacactggtcatgttctatgagggcctaccctaatcacctcattttacttttttttttgttggatttttttttttttgacaaagtctcactctgttgcccaggctagagtgcaatggcatgatctcggctcactgcaacctctgcctcccaggttcaagcggttctccaggctcggcctcccgagtagctgggattgcaggtgtgcaccaccacgcccagctaattttttgtatttttagtagagatggggtttcaccatgttggccaggccagtctcgaactcctgacctcacatgatctgtctgcctcggcctcccaaagtgctggcatttcaggtgcgagccatcatgcccggcccttattttactttgattacctctgcaaagaaggtcacattctgaggtactggaggttaggattccaagaaaggaattttgaaagggacacagttcaacccagggcagtgagacgtgtggaaagggccccaggtcacagctgctggaggatccagggctaatgagcagctaaaggaaagaaggactggagaagagcagatttccacaggcctgggcgccctcccgtttaggaagcctgccccagaagtccctttgtggcagctttgaaatgcacctttctggcccaggccaagggctgtgctattgtgatgatgcgtgaaccagaaaacacccattggtgtgcctgtaacacagctcacagacccgagaccgtcctctcctcccagaagtgagtcagcgagtttcaggatcagagcaactgggcaggtgacaggtcagcgatgtcccctctgcacagttcccagggtgtctggggcagattagctgggcagcgagatcacagagcaaccaggccataaattgctccaatgaggaggcaggacttttcctccctgcccttttcaaacttgctgtggtggattccttttttttagttcagggaagattgatgatttcattacttgtggcactcagcaacaaatctcagagttgcagctaaagtgagctctttcaccacgctgcatcttccgctctgctattcatcatgtttaatcattcgcttacctcggaccgctgccggcctcgggagggcagggtattacggacttgggacagttttacactttagaggctgaggggaggggactgtgttaggaaggaacagggctggggtgggaggttcatggctcaaggtgggcgggagccagtgaagcttcaacagaggcaacagaatgaccaataaagggaagtgacagcaaaaccctcctgggacctcaaaggctggccctgtttgccaagaaaatctctcataaaaggggtgagacttaacgccaaaaagaaaaggagagaaacggccggagggttctctgccaagggaatgttgaagaatttaattcgagatgaaatgtgctcttgtttgtgtacaattaattttctccccaaatgaaaggttttgtctgtcacttgagtgtttcaatagcaaccgcgtaattaaggtagcatgtgcctcttcagtttgggaagcggctgtttgtgttaacatgttggggaagcacacattgcttggactggttcctgggtctaagaaggtaaaaaacaaaacaaaacacacaaagaatggaagaaaacacctccaactagagccttggctcctgcggggatgatgtcatctggaaactgtgagcaggaccttccctgagaaccaagaggcctgggcttcctgggatgggaggctgtgaggaggagaacttagacagtttccagaaactctaaaaacggagtcatgaattcaaacgcccacgggggccaggtaggaggtgtatgtcctggaaggggttggctgtagtttttcaacacaagtgtgttttgtttgcgtagcaacacacaggtgtgaatactttagtgccacaaaggagtatgcactctcatttgtgttgaaatacatgggtctcctaatttaagtttcatgggttttttttttcctgttaataaagagatggtgtattacttctctactgctgtgtaacaaattgccacaaatttaggggtttgacacagcagccatgtcttatctcacaggttttccaacatgatgtggctggattctcctctgaggatctgaccaggctaacatcagggtatctgccaggctgtggttcttatctgggactcaggtcctctttcaagtttcctggttgttggtagaattcatttccttctcatgttttccatgtggtcctccctatgttcaagctagctatggtgggtggagtcctactcatgctttgaatctctctgccttcctttttagcttttaagggttcctgtaattatcttgagcccacctggataattgaggatcatcttcctatttgaaggtcagctgactatttaatcttaattacatctacagagtcacttttgttctgcagtataacatgataatgaaagtcacatctggtggtggaggttatggagaccaactcaatgttgagaagtgaaaaatctggttaaaaagagatgagagatctgaacagacattttaccaaagaagatatatgagtggcagctgagcatatgaaaagatgctcaatgtctttgttgatgcaaagtaaaatcaccatgtgatgccacgacacacccagtagaattgctaaattgagagagactgacaagaccaagtgttggcaaacatttggagcagacggaacactcctacatgattggtggttgttccaatggtatcaccactgtgtcaaaacagttcccagtttcttacaaagtgaaactcacactgtttgacccagtgatctcactcctcggtatttatccaaaagaaatgaaaacatatgtccacacatagcagctttattcatcatgaaacaacacaaatgcgcatcacccggtgaatgggtaaacacaccagtgtatgcagttacaatggaatatgatactactcaacagcaacgcaaaagaaatgatttaccgataaaagcagcaggaatggagttcaaaagtataatgcagccggtcccagtgtgctgtggctccacgtggcctgtagtcccaagtccgtgccccacattgcctgcctgccatggagcctgaccctaagggccctgctgcctccagcctcactgccatccccgaagtctcgttccaccagacgtgtagcctgtggtccgggcaggccttgtctctgctccacgaccagcactcgcactaccagaacatccttgtcttctgcagtaaaacctacagcaatatgctggtgttggatggcatcgtcctgggcatagggagggatgagttctcctgccaggagatggtagccatcctgcctctctgcagccaccccaagccacgaaaggtgctgatcatcgtgggcagagatgggtgtcttgcacaaggtggggaagcacctctccatggagtctgtggtccagtgtgacattgacaaggatgtcatccaagtctctaagaagttcctgctaggcatggccagttgctactctagttcaaagctgatccttcatgtgggtgacagttttgagttcatgaagcagaaccaggatgcctttgatgtatcactgacttctcagaccacatgggcccggctgaaagcctcttcaaggaagcctattgtcagcagatgaaggtgaaggtggccctcgcggaggacagcattctctgctgccagggagagcaccagtggctgcaccttcacctcataaggagatgtggcagttctgccagtagccgtggtgggctacacctactgcatggtccccatctacccctgcagccagactggcttcatgctgtgcggcagaacatgatcacccgtgaccgggagctggtgcagcacctgacacagcagcaggtggggcagatgcagctgaaatgccacagcccagacacacaccgcacagcctttgtgctgcccaggtttgcctgcaaggccctgaatggtgtgagctgagccccactgccaccaccaacaccacctgggacctcggacaagggagtctccagggtgcctgggtgcctccagccctgggccagacctcctgccggctctcactgatcaaccgagtgttacaggccccagaatgctgcccggcctgccctgctgggtggactgtctgtctgtgtgtctgtgttgctctgtgtggcattcagcctccaagcctataccagctgtgcacaccgctgtctctctcacttctgttaccctcctcactcaccaaacacatgtattaacaacaacaaaatagtatgtttaggaagaagccaggcacaatgcggttccatttgcatgcaattctagaaaattcaaaacaaaagtgacaaagagtagtggttgccaggggctgatagtggagagaagagattgactgccaaggggtgggagaaaacttttttgggatgagggaacattctggattacgattgttatggtggttatttatatgactgcatacaattgtcaaaactcaacaaaatgttcacttaaaattggtggcttttattatatgcaaattataccctcatagagctgacattatatcattactataatggaaaaatcagtgctccctgccaaaatttcaggcagctgtaaaaagaaatacacatatgtggctgggtgcggtggctcactcctgcaatcccagcactttgggaggccgaggtgggtggatcgctttgagctcaggagttagaagctagcctgggcaacatgtcaaaaccccatctctacaaaaaatacaaaaatcagccaggcatagtggcttgcgcctgtcattgcagctgcttgggaggctaaggctggaggatcgcttgagcctgggaagcagaggttgaagtgagctgagattgtgccactgcactccagcctggtgacagagtgagaccctgtcacacacacacacacgaaatacatatacgtaaaaagtatatgaaaagtatataaaaagaaaacagacatcccgggtgttgtgtgtgcctccttgcaccccccaaacccatactatggcttactaggcactagattccagctatgggttacatctggagagccccctattgcccccaatagatgaccacagctgtatagattgtgactatgaagatatttgtatgcattgtagaatcagcttaatatgtgaaatggtagatgttattcaagggtgctagtctaaacccacaactggaggtttgttcagtgagaagtgattgtacacacggtctgtcaaataggaccacactttgcgcctccaggactttgcacatactgttccctctgctgggattgctcttcctgcagctctttgaccagccggtttcttctctttcttgggattttggcatcaaaatagtctcagaaaagccctcactgaccaccagccgtgctaatgcagcccccaccccaattactctctgactcaaagccatgctcatttttttcaaagtcttttcctaactagcttgtttattgatttaactgtttttttttttttcagagacagggtctcactctgtttcccaggctggagtacagtggtgtgatcatagctcattgcaaccctgaactcctggccttaataaagggatcctctcacctcagcctcctgagtagttagaactacacacatggtttttttttaatctaaaattttttgaaatttattttttgtagagatgggggtcttgctatgttgcccagactggcctggaactgctggcctcaaacaaccttcctgccttgatttctcaaagcactgggattacaggtgtgagccaccatgtctagccactgatttaaattcttgagtgtagattttctttccaaccagaccatgagccccatgaggttaaagccaggtctggaccatcccatgcagtttctccacagccttgagtgggggcagtcacaaagcagactggattagttttccattgcaatgtaataaattgccataaacttggcagcttaaaacaatgtgcttttatgatctcacagtttctgcagatgagaagtctgggcatggcttagtcaggccctctgatcaaggtctccaaggcggcaatcagagtgctggctggggctggggtctcatttgaggcttggctcctctcccatgctcctgtggtgttggaagaattcatttccttatagctatagaactcacagcagcttgcttcttcaaggacagtgggagagcatgtctctggcttcaaatctcttccttcaaaaagcctgatattctcttttaaagagctcacttgattaggtcaggctcaactgagataatctctctttggatgaattcagggtcaactgattagggaccttaatcacatctgcaacataacataatctaatcacaggagtgaaatcccatcctatcagcaagtcccacctacatgcaaagagagggtgttataccgggtgtgttcgctgcggggtggaaatcttgcaggccatctagaaaattctgcctacaacactggctctcaatacatttgttgaatggataaaacacctgcccttccaaatgccttcctttgtttaagattatttcctttgccaggagttctttccatcttgctgccgactttgcttgtcaaaatcttgtttatcctctggctcagattcccttctcattcctgacttcctcactgtttcaggcagacaaaggttaggatttaccttcctcactacacatgtgaggccagatggtttcttagttgtaacgttcttatgtagagacacacatgtacatttacgtaaaagggatcacatgactcctgttggagtgtggacacttttttcttctctacctttcccctcacatctgtccctccatctccaaatataacttgtattttaaaaaaaacaggatatccttccatgttttcctttgtattcctataaccccataaccctgcaaagctcatttctttctctagaactcctttctctttctctttctttctcacacacacacatacaaaggtataaaaggaactttttttaagggaggatgagtcattgttttgaaaaaatggtattgtatgacatacatttttctgcatcttgattttctcactcaatatcttgtaggaatatcttcaagtcatcttgtatagttccaaattaaagttagttccttacaacagatgtgcattatgtcacgaagtgaatatactcacaaagtgctcagccattcccctggaaatgggaatttgtttgcttctggttctgcaccactatgaacaacgttgcagtaagtatctttgtacattttggtacaaataggatggattttcaacggttcaagagctgggtgcatacacagggtatatgcacttttaacaattttactaaatgctgccagattgccttcagaagagattgtatattccatgtttctactagactgtaggaaagtatatcttccccacagcccagctgcaataggatttatggcacttttaaatttttgccagtacgctaggcataaagccataactcagggttgaatatgaaatttcttgaatactgaggaattcaaacatcttttattttcctttactttctttcttttttctttttttttttcctttttcttccttcctctctccttccctcccatctttccttaattttcttttttaaatattgagatttgctcttctgggaatggtctctttataacctttgcctctttctggttagtttgtaagagctctctgtatataatagaaattaaccctttatcatttgccttacaataattttgcagatttatagtgtatatgtatattttatttacataatcttgcaatgtacaaaattttaatattcaaatatgcttttttttcttttattgcttcaggatttccattcttggtttgtaagatatccctaacctttagattatatctgtagtatcttagattttcttgcaaaattttaatttaacttcgtacaatgaagtcttcgtcttgttagaatttaactttgtagaagacatgagacagggatgcattttagttttagccttaattttctggcaaataggaaaccagttgttctggcatcatttgctaaacaagtcatccttttcctgttcgaatgaattgctgtcttaagttacctggtggtttcttgggagctcagccagcatcgtgaatgttgggtataagttttgttttctctctaaccagcttgagtgaacagagcatcctggggtgcctctgtttaatttgtttactcattcatttaacattagttgtcatctattatgttccaggctgaaaaacatgcccattctatgtcctcaaggcctttttggttgaatacgagatataagaaaagtacaggaggtctttgtcaaccaagaaaaatagtcccttaaagtcaatttacttaagacagggacaccatatttcaaaataaagagtggaaagagtgattgagtctttatcttgagtagtgaaatgaaaagttttagagaaagtgtattttcttatctcaacaaaattgatgccataattgcaatgaaggaggcattgatttgggggtatcattttcctataaatcccctgcacttcacgtttaacgttcacagttctataaaagaaattcagttttgcaaaatatttcatagctcattcatttccacaaaggactcaattcttttgtatgcaaataattctctttttaagtacccatcaggtagtgtgtcgttaactggtctaattaccatgtcttcatgtgcccatggcttcatgagctgttctcactaatttcactttcatgaagttcacgaaatcccatagtctttgcaagatttgcatttccattcggcactggttttcatctacttgcatgatgtgcacagatgttttcacgtcaccctcaggaaacctggcctctgaggacctgttggggttggcacaggggagaaaagtgcaaagtgcagctgagactgaagaggtggattttggagatgaatgttgtaatcggccagttcattagtgaactcttggactgtgatggctttatctctctatgcaactttgtaataactatggggactccattcataaagatttggaccatgtgaacgcctttatacaaaaaactgtgatctacaaaataggagagaaatattgctggaacactctgggagttctgagagggaagtggctacggctgggtgagaggctcatggggaacaggtgacggggtttgcaggagtggcaggagcccgctaagtggttcctgaaggatgagttgggttggcagagggcattctagctaaagggaacagcatgaccagatgcagagaggaagacacgaagagcaacatacgggtctcccttcaaggaaggatttgctgctgggctgtggcaacatgtggtcagcagacggtctccagctggcagctggaaccacctctaccataatcaatgtctccccgtgcctggcctgtctcccacttcctttcacaaatgttgatccctaaaaacaacttccactgaaaactccgtctcagtttctgcttctggagaccccagcccgaggcaagagcaatgggttggtgtgggggctgcagtgggatccacgtggttcagctccaacagcaggagttccccacctggttccaggttttcaccatcaagtccatgcattcctcagatcgaggggttccacggttgacgaaaagtatcatgtgtcatgttttggggattttgatgagatttgcctgtgacatcaggagtagccttttatttttatttttaaatgcttatttctgtgcccagcccagacctttacttgatgtccaggttcatgcaatcagctgtggttgggctgtctccaactcaaatagtcgtgggtttccctggccgccttctccctgcatcccccacctccatgatggcccttcttcctgcccaggtgctcaggccggcatggccagctcctctcctcccctggcacccaccctctgaccgctcagcacctctgtccatctgctgtccacatggaccaattcccgaactccggcctcctgtcttctcccgctgcagtccctgcctggctgctctcggaggatgatcacaccgcggccctccctggtctccctgctcagcctccacctcagtctattctttttttttttttttttaacttcttaaatgcacaaatttattttttctcaacaaacacacatcttaatgcctttacaacttttatctccccaaatatatcttgcttttctttatacatgctgtatacagagttgttttccttatatttagtagttattgcttttttgtgcccttttgggtcctgaatttacacatcaggcatagagcttgggacaggaaagagctgtgaagcaattcctggaagatcaaaccccttccagcatggccaggtagcacagctgagccagggatgatggggccatattgggtttggctctgccttgcagctggcagtccaaacacacctcagtctattctattcaacgattcagatcagccaggccagcaccgagcccgggtctccagcctcgctctgtgcagccacagcctttccccggtcgacagggccctgagcctctggcaccttccacctgccggtctctttcctgcttctctcccatgtggccttgctctgttcaagccaggagctccccacctcggggtcttaccctctgccccatccgtcctgggatgctcctttctgggatgtccacccactgtgccctcactgcctgggcacctgctgctgagactgcagaggtggattttggcccccttctccgggggctcctctgatgtccatgagcaatcacagcccccaccgccaccccctcccttcccagggctgtctttctccagcgcacttcccaccatctgacatagtttgcgtgtcgcacaccttaggttggattctgtgcagcagaacctgagcacccatgtgtgggagcccgtgcaaccctcgacacagcagcaggtggggcagatgcagcctcagatgcgcaccgcggggccttggtgcctttgagactgggcgtgactcagttcatctggagaagtccccgggaagagagggcaggaccgcggggagggagacgggaaggaaaaaacgcccatcctgatgggataaggagcaggtgcccacggtgggccactggtgctcagctgtgctggggacctcagggagacgctgaggagcggcctcagaggggtgcactggagaggcggggaggccagatctgctcccctgcagcttccattcgcccagggcagctttccaggactccactcccaggtcacacaggctcctgcagcccgaggaggccccgcaggagagcaggggcagcaagaagccatggtagggcaaagacggtgaggcttgcgggacccacgcggcaccaccagcttctgctttgtgcactgtcttgggctgtcacctgcttatcctctgggtcatgagctccctgaagacaggggtctgttttgttctttgctgtggccagagactacaactgtgcctggagcacagtcggccttgcttaaatatgcgctgagtgagtgacgcctcctgggtccgcctctgcaggcttctgagatggatatttggcatctttaaagaacccagatcccaggcaaagtcgcccctgatttggctgatgcagactccatctcctgctgcttctgggctgactccgaagcctgttgctactgtttgcagccaagttagtgttcccaacagcggcagctccagagagggactcagaccgctgataaaagctcccattacaccgggtgtttttctgatgcttttgtacagctaccctttgatgctgcagtcatgaatcctgacggcagagtgacgataatggtccctattacccctggcatctcacttgataggatgaccaagagcccacaaatcgctcctgagtgtacctctagcgacacatttttttttttttttgaaacggttccacctggtttgttcaggagaagaaacaacagatacgtgtattttcatttcttcctttagtggaggtgtcacaattgttttggaagttgtccaagtgcccaagaccccggtcacagactcgaccatcttccccatccttgaaagcaaagcatccatctccacatctccagcaccagcacagggcctggcaggagatagggctcaaagcaaagcgtgtctatgggccacccgagtgaggttagatgggagcccggaccgctggcctgcaggagggcccgaagtctgcgtgagtctccttctttccctgggggaggttcagccccaacaccgtggccaggattgctgcagaaggagcctccgcctggctcatcgcagccaggcgatgatgtctcgtgctgagtttgagttgggtgcttggttaaggtgctggccatcagagttctctgttgtaaaggatccctttccctttgaaattgccaaataacatgtgtggtgatattttgggaccttgtggacaccctgtttgtcaaaatcttcccccagtggttttgcatccactgatggtctacgtacaatgattacattgaaggttgcaaatggtcttgtacatttaccagcaggccttcctccaggaagaactgtccgttctctcagtcactattttcagtatggttatggactcagggattcttttttactccatgcattcacagccaccaccgaaattgttttatgttcttacgttcctacatctggccagtgggagccctattcttccagcttctattttgtggtttgttctgattgccccctttgaggactttctgattttctggtacaagatgaaatcttaacaacacgtcaatatcatgagaaacaaacgaggagggtgcactgttctaggagatgggtcatgacaaccaaagaccatgcatgaccatccatgggatcccagaatgaggaaaaaaagctcgaaatttggacttataagccagggatattcaatcttttggcttccctgggccacactggaagaagaagaatcgtcttgggccacacataaaatacactaacactaacaatagctgatgagttttaaaaaattgccagaaaaaaaatctcataatgttttaagaaaaaaaattgtgttgggctacattcaaagccattctgggccacatgtggcctgcgggccatgggctggacaagcttggtataagctatatttctgcatcaatattacattattggaggtgaaaatggtttggacactttgtagatctatttttttttttttttttgagacagagtcttgctctgtcgcccaggctggagtgcagtggcacgatctcggctcattgcaagtcctgcctcccaggttcacgccattctcctgcctcagcctccaaagtagctgggactacaggtgcttgcaaccacgtcctgctaattttttgtatttttagtagagacagggtttcaccatgttagccaggatggtctcaatctcctgacctcgtgatctgcccgcctctgcttcccccaggttcaagcgattctcctgcctcaggctcctgagtagctgggattacaggggtgcgccaccacgccccggctaattttatgtatttttagtagagacgcggtttcgccatgttggccaggctggtcccgaactcctgacctcaggtgatccaccgtcctcggcctcccaaagtgctagtattacaggcaggagccaccacgcccggccaaaatttttctatagctttaacatttttccaaatagtaagttggagaaaataaaaataaaatcaaataaatcagacaagaaacacgtattgaggttggaggcaaacctttggccctttgactgctctgtaaatatatctcctatcactgctgcctgtgtgtgccattgaaagcagacactttttttttttctgactaaaggataaatgtggacagactgaaaagcaattgtctctctgtcattcaggagaaggataataaggcaaagaggagggaggaaggaaaggagggaaagaaaaaaagaagcaaatgtggaaggcagaatggaaggaagggatttattgattagcatgtctgaaccaggcactgtgttaggtacttgcttttacgttattcatctccttccaatggcaacctttaagaggcaagaaaatcagggcttagagaagccgcaaacctgtcccttggccacaaaataaacactgggcatctcagataatgatgttcagcaaagaaatatgattaagctaattagccataaggtgatattggtggaaagcttcctggacatagagatttaaaaaatccttggctgggcatggcggctcatgcctataatcccagcactttgggaggcctaggcttgagcccaggagttcgagaccagcctgggcaacatagtgagaccctgtctctacagaaaataagaaaattagctgggtgtggtggtgtgcacctgtagtcccagctacttgggaggctgaggtgttaggatcacttgagcccagaaggtagaggctgcaatgagctatgattgtgccacagtactccagcctgggtgacttagtgagaccctatctcaaaataaaaataaaagcaaaaaataaaaaaccctgaccaaggtttatctgtttgtaaaaggaagctttgtagcaggaagggttgtgtcccttgagctgaaacatgagtagggacagcctggccctctcacctaagttgaaccttggcccattggacaggccttggaaagcaggtgctgtctcctttgcttcttacacagtctgtgggacatgaccctggcaggaccctaccccatcagggtgctccactccttgcttcacagtgaggagtggaggcccttgggggacttggtggctggggtgagccctgagtggagggtggggctgatctgggcacagcctccccacccctggccagccctttacagggttcagagcaccatgggcataaactcaggggcttcctctgcaatttgaagatgctcccgagaaataatcttaggcacaggaaggctttgccctgtgctcttacaatggagtcagcggctgggtgtggaaattagggtgagagggtgggaatatattgccccttccccagccccagccacccatgacaccggcagctctgggagggaaggacacttttgcaaacttaaacagcactgacaaggactctttctgattgctctccagtgagacatgagtaaattagctaattaaggcagctccactgaatacattctacatgcaggcaatttgctgtttatttcccacatggacaaagaaacgaaaataggaactaaatcaacatctcagaaagaaaaaatacctttgatgaatgaattataatgaaagatttcttgattattgaaagtgtgtgaaatggttctcaccccaaggtcaaaaatttaatagcccccgtccaaaccaaagtgtccatcattcgttcaggaaagtatttgtttagtgcctgcaacgtgccaagcctgtggctgggcctgatgatgaaatggtggggaaggcagagcaaaggaggatattaatcaaatagtcaaacagatgagacagatcagagcccttctgtccacatttcctggggtctggcatctcttgagattctggtaacaacaggccaggaaggaggcagacgctgtttgtgcaaagaagacagagtcggtagatgggacttgctggcagttgaagcctcacaaggctctgatatgtttcagacgctcttttttgaggccacgtcatcctgcggggtcctgtcctcccccagctctcaccctcctgggcagttctggaccagacaggaatgactgactgtcacgccacagtgggggcagaagagataaggtctggggcggagtggacagtccagggagttgaggagtgtcagtggaggagaggagaaagtgagggggtgaatggagaaaagggtggggccagcttcctgccggccgagggggggtcttgtggttctccctgacagcttgggatggaggtgcattcccatggataagcttgggaggcaagtggccagagaactcctatcccaccccgttcctgtgtcacagggaggatgccacatgggttgcgatgtgcctgaatccgggtgaagtactggctgttcactgtttcttctttgtgtgtccctggatggcaaaggagaggcctattttattgcaaactgttgcactcctctcctctctgatgagtgcattcagccagagtgtgcgttctcacatgtctgagatccctgaactacttggtgaccaaccactcccaagaaaattgctctagttcttaggacagtccttggacacattgagcattcagtaaacatctgtggacccactgaatgcgtgtcttaggactcaggcaggggccctgtcaggggatggtgctgttggcttcctgctcagaagctaagcagtgttgggcctcgctggtacttggatgggagaccgcctgggatggtgctgaggagcaggagtggtgtcagcataggggctttgggattcagtgtcccctttgagggaagcaggtgaagaggagacagctggggcctggatattggagtccctgggtaaggtgcccccaaatttggtaaatttgataacaagtgcctcatctcaaagtgagggccatgggtgggtgtgactgcagtgggtgctggttaaaaaaaatgtaaaaagctcttctggaaaaaagaccccaacaaccctgatttgtagcaattgccagtttccctggtgtaaatattcccaccatggctgatttcaagctaccaaagatgtaaccacaaattagcaaagtttctgaacatttcacagttggctctcagagccagctgcctgcactccactgggtgtgagggactgtctggtccctactaggggtctcacagtggatgtggggtgggtgcaccatggggctgtgggtgagcctgtatatcctgccatgcaacgggaagcattacttgaatcacccacaaagtccagcagtgaggacctggcagatgtagaccaataaacactgaagaagtggaaccagcagggatgaggatgaagcaggatctcccaaagggaacacagaccatgtcaggaggaggagagacccctgtggaggctctgaagcccctaacggtttttgaaaatgtctcctttgatcaggctgcaaaactcaaacctggggggaaagaggttgactgtcgctacaattttattagaagaattatgttgaaaaatgagaacttgattcattctttgattaagaattagggcacaggctgggcgtggtggctcaggcctgtaatctcagcactttgggaggccaaggtgggcggaacatgaggtcaagaaatggagaccatcctggccaacatggtgaaaccccgtctctactaaaaatacaaaaattagctgggcgtggtggtgtgcacctgtagtcccagctacttgggaagctgaggcagaagaatcacttgaacccaggaggtggaggttgcagtgagccaagatcgcgccactgcactccagcctggcgacagagtgagactttgtcttaaaacaaaacataacaaaaaaacaaaacaagaattagggcacgtttgccactataacctaaatgttgttgaataggagagaaaaactcattttcgccaatttaatttcatattttttgataaagctgtagttaagcttttctcttttctttttttcttttttttttttttcagaagaggtggtgagtgtgtggctgacagcaggggctctggtgcagggtgacctgatccagtcctgatgatgccaatttctacacaagcaaccacctttctgtgcctctgtgttttcatctgcaaaatggggacggtgaggtagtagtgcctgtgttttggagagtatatgatttaatacacatggagtacggggaacagcgcctggcctaaagtgagtccaaggtaaatgtttgttaactaaatcacaaagcatttgttgtgaaactttggtactcaatttaattgaatttaccttgaatgggctttttagttgtacgggttgtcctcagataacaacggccttgtttcattacacgtggtcctggctgggaagaaaagacaccacagtttgataagaggggccttgggggacctgacctgggccctgggcctgggcgaggaggtgatgaggacacaggagaatccccccaaggaggtgacattcatctgagatgtgacaggtgacgaggctcctggaggtaactgggtgaggatggggttgggggtgggggcacattctaggaggaggggccagcacgtgccaagaccttgaggttccgggaagcctggtctgtccaagaccagcggagaggccagtgtggccatgaccgagtggacacaggggtgagtggtgggaggtgggactggacgggggcagggacctgtgggggtttggtccaagggcagcctctgaggtttgatgggtccgatctttctctttggacgtccccatgggagggcctccttgtctaaggctgatcttttcctccccattcccaccatggcctgtttcacaggtaagaacccgggtgggaggggagacctctgtttcagggccttggccacatctcaggagaaaatctgtgaagactgattttcaggaaatgcttggctgggaactctgccatgggaagcaggggtctgagagccaggtcagcgatgctgtcttgtactcgtgactgaactggaggccgggcagccaggagaagccccaggaccctcctgattcatgcgggcctatgcaggaactgccaggggtcagaatgaaggcatctggcttcgggagcatccagtgggaagcagcccaggctgggaagtgcagattttaccggagctgtaggttttcatgaggaacctgggggtcactcaggcatctccctgcaaacagctgcctgcccacggtgaacatccaggggtcaggtcccagggcttctcctggcttccctgcctccagttcagtcccaagaacaagatggtgtcactgaccttgctctcagacacccgcttcccacagcagagttcccggcctgcctgcaaagtgctaaccacactgttggaattcctcaggggtgagcacgagcctctccgtttcatctgtgcctatcgtggacacattaactatttcatgaagtaacacaagtagcatctggagtaaaaaaattaactaaaaataggtgaaacagtgaaattcagtgacaaggatgctcatgaataattaagaggccgacacaggaccacgttttaaggagattctcattcctaagcctgttgcttttccctgcacagcacaagcaagacctgatttcccagcaggaaggttgtcttaattaaatcttatttgtcaagaaggcaagatgtatttgtgtttcctcaggctcccattattataaacttcgcaatgttttctctgagaaatgctccttttctgctcaaaagagctgattgttgctgtttttctctcttccattgtgagaaggaaatgctacaagttctttgtcaggtaatcaattatcctccttaaaggatccctgaagtgtcatttgaaaattatggctcctgaaaaataataaaatggccactttaacatattgttgcctgtcagagtgagtttctctcccctgcagagtcacagagcctgtaaattgcccgtggtaatgacctctggctccaaatgcagtcactggtctctgcacagatagacactgtctgtcacttctggggtttcactgttgacgctgtgtctcttttagcttctaggaagccctgtaatgatgctgtaattagcaatgcatccttccctctctcccaactccaattgctgtaatttatgtctctcaacaatacttacaccaagcacgccatctgtaccactgtgtggggaaggaagttctcaggttcaaggtctcagggagataaacacaattttaagttcacagacatcctcagcaatcaacatcaactaccacaccaagaaagcaagaccttggtattgttggcgagtagcaggtaattgatgatcttgtcagcatgatctactgtccctgatctgtatcaatatgaaataagaaaccatttaagaggtgtcaggaaaacatgtcaggcccccctcctcctcctcctaccatttgacattgactcattcacatataaaattgagtctttgtgatggtgaagtgttaaagaccccgtgtagtcaaattactatcatgaaaccagtgagtggaaacaagttattaaatgtccctggttcctcctcattcaaacaggtggaagaaaacaaacagaaagcttagatgcaaatgtgacttcatgcccaagtgttcgtgagaaccaatatacgccaagaaagagaaagccgggtggtgccccagataattcgggtgaaaaagacttctaccagaaaatcaaagacatccaggcacagcttgaggatgcagccgtagtccatccatcgtgtcttcttgtgaatgagcctcaagtttcttagcaacacaggacacgctaagtgtccctgtgacattcagtggaaatgttgaagcatcactgaaattccttgagccaaggtgcacctgttcaggtctcaagaccttttctgagagctgggcagaccaccttccctcactgggcttcagcttccttatttaaaactacacattcctttggacattccttgtttctgcccaatgcaagataaaggagaggtggcagaaaagttgaacttgtttctgctggtgttcccggaagaaaaatcttgatctcagggcatcctgaggtgtgtccttgggagaatggatccttgatgttatgaatgaattgtgtaggaatcgcaccctctaatggaaagtcgaactttcagactcgccaaaaatccaaaaagagggttctgaagtgtatgtggaatcttcatgtgtctttttgcaaggacattactcattcattcccaaggcattgggccgttccactgtaattcacagttagttggttaattgctggtgtagaccccaacatttagatatcctacttccttgcaagcagagccctggttttgctcagatgctgggaagcaatgtgctctctgacaccagggagtggattaccattggtctgagcccagcatggcagtctcacttacttttagtaattggcttggaggggacattgagtcagggctagtcaatgagatgtaatttgggagtctattggtgggggcttctggggtctctaaggggatctgtgaggagcaactctctcttttctctcttctttattctggtcatggttctgagtggatgtcttggcaggtgagatggcagccatcttgtctctatgagggcacaaggcagaggagaaggctggcacacagaggaagggagagcagagccagggggcatcagcagcaagtggctgaggtgaccagcaggggacttgcctacgtgtggctctcagacctttccttattgctgcaagcatttccctctgagaaggaccagctctacccacactctaccactccatctgcaagcccagaggtgcccaggagtcccttggcctccatatgaagctaccccttccctggcccacacctcagctgacaggggctgataggaagctccacaatgctgcgtgagcctggaaagatccccaccttcctgctcctaaagacacaccttccccaccacattccaccctgagagcatggaattaatcaccggataccttctattcctgttgaagtccatctcctcgtgaagcccgcctcctgggtcatcctttgtcccctggactctcagccctacatgacccagtgggaaatgaggcctgagccctatttctctggcccttcctgccctgtttctgtgtcagtttcctttgtagcattgtcattgtctgactcagtctttcctggggatcctggagacaatcatcttagcccaggtctcctcacccagagccaaggccaactgaaagagtcagtgcctttggggcgcagtgccttcggggcagatgcagccccaggggtccagggtggggaaacgggaagcgaggtggggaggctgggaagtgatgactgagctgatgacagcctcccaaagacccagctggtcaccaggtcacgtggagcatttccagacaagctgtgcagaaacgctccccacaggatggcccatatggggatggttgggaggggccatttatagctaatctctcttttttcctctcccttgagggtgcaggtttgctcttcagggagtcgtctctttcttttcttttcttttcttttttttcttgttgagactgagtcttgctctgtcatccaggctggagtgcagtggcatgatctcagctcactgcaacctccacctccagggttcaaatgattctcctgcctcagactcccgagtagctgggattacaggtgcctaccaccatgcctgactaatttttgtatttttagtagagacggggtttcaccatgttgggccaggctggtcttgaactcctgacttcaagtgatccacttgcctcggcctcccagagtgctgggattacaggcatgagccaccacacctggccgagtcttctctttcttaacaccagggtgcatcacccagtcccttggcagctgctggggaatccagatcccacgctcatttttgtggcaacttagctgaatccagaattggtggaggatccagaatcttggggcgtcggtctcaggccgtgtgtggtgtaaggcctgaaactgaagtgtaatattaagtacggccttgatgtctttgagcttcacagggctgcagaggccaaactactagttcccttccctcaccaatatgctcccagctcagtgggaaagactcccacctggtaggtttacctgtcaactggagcagccacgctccacctggtcctcagcttaactggcttcacctctctgcccacaggaaccaggggtacctcaccccgttgttacttcaaggtctgcctcccacagcccctcctgttctctctgttcccaggtgcacaccctgtggctctgcagggcgcgtgttatcctcccctgcgggctgtatttgtggccgacccactgcccgtctcatgtgtgcagcgctgggtgttgtgtgctcggccatctcatactatttagggcgaggatgcatccctcaccgatggggtgaacgggaggtagtcggaacacagtggtgtcctgtggacctgcgctgagtcagttcctgcagtggaagctggggaaaccagaggtgacacgctgcatgggtctgatacacagcccggagagtttgcatctcatttgcttgacagtttttctctagtggaaaatatacttatttttttttctttttcttttcttttctttttttttttttttgagatggagtctcactctgttgcccaggctggagtgcagtgtcacgatcttcgctcactgcaagctccgcctcctgggttcacaccattctcctgcctcagcctcccgagtagctgggactacaggtgcccaccaccacgcctggctaattttttgtatttttagtagagacggggtttcactgtgttagccagagtggtctcaatctcctgaccttgtgatccacctgccttggcctcccaaagtgctgggattacaggcatgagccaccgcgcctggcccaaactactttttaatgaatggcctcttcggaaactgctcaagggggaaagatgactctggttcttgcagccaaagtctgtttccctttgcactaagactgatttgtaatactcatcatagccgttcattttacttttgtggaatgaattccaggagaatttctcttttacaagcctatcaaatattaggtggttttgagcaagagctttcataagcagtgtgtcaggctaacccgcaataatgtgagaaatttaaaaaataatttgattattttccttacctctgcctccccagtgaatgggatgacgtgaaaagtgtgatggggatgacttcagaggcaaggctccgtcttcacagagagaggccatgcagcctggcttcacccagtcagaccacatctgtgattttcttgctctccttttagcctgacacactttgtttcttcatttcactttgatttttgagatataaatcgaaatccacatacaattcacactttaacagtataaaattcagtgttttttagtatttgcaaggttgtgcaaccttcaatatcaaatcccagaacattattattgccaaaaagaaaccttgtacccattagcagtcattctccaactgtcctagggaattactaatttattttctgtctctatggacttggctgttatggacatttcataaatgggaccatatacgatgtgatcttttgtgtctggcttttttcacttgctataatgttctcaaggttcattcacattgtagcatgaatcagcatttcattcctttttatgcctgaataatattccattgcatggataactgtcatttttgtttgtttgttttattatgtgtttttgagacagggtcttgctctgtcacccagtctggagtacagtagcataatctcagcttgctccaacctccacctcctgggttcaagcgattctcatgcctcagcctcctgagtagctgggatcacaggcatatgccactacaccgtgctaatttttgcacttttagtagagatggggtttcaccatgttgtccaggttggtcttgaactcctggtatcaagtgatctgcctacctcggcctcccaaagtactgggattacaggcatgaaccaccacacccagcctactcttttggtttgaagtgaggaacaattcaagttaccttaaacaaacaaacaaaagaatgttaggcctcacgtcactgaagagtccagaggtgtggtgggcagattccagaatgattcccaatgacccttgtccttgaaaagcctcttccccttgagtgtgggtggagcttgtgaataggctactactcctgtgacatcatatgacaacggggattgtgcagatctaattaaggctattagtcaattgactttgaggtaatcagaaggcagattagcaggtggacctgacctaatcacactagctgtttgaatctgggcctagagatcagagacagaagttaggaattcatatcacaagagtgattcaaaatgccattgacttaaaaatggaggggcccaaatgccaaagactcgggaggcctctaggagccgagagtggttcctggccagaagatgggaatcttggaaccttagtcttttcatgttttgttttgttttgttttgtttctctgcacccccatgtttattgcagcacaacacacaatagccaaaatatggaatcaacctaagcgcctgtcagtgggtgaatggatttaaaaaagtgttctatacacaatgggttattattcagccataaacaagaatgacatcctgtcatttgcagcaacatggatggagctagaggccatcactttaagtgaaataagccaagcacagaaagacaaatatcacatattctcactcccatgtgggagccacaaaggtgaatctcgtgaagatagaaagtagattggtgtctaccagaagctgggaagggtagggggtgggggcatgaaaagaagttgattaatgagtatgaatccaaagtcagatggaagaaatatttagtattgtgtagatcagtagggtgactacactttacaataaactattgtacatttcagaatacctagaagggggagccttagtcttgtaaccaaatggaattaaattgtgccaacaacatgaactagcttggaagcagattttacccccagagccaataagaactcaataccttgttctcagccttgtgagactttgagcagagcccagtactgctgggccgaacttctcacctgcagaattatggactaataaatgggtgttgttttgagccattaagtgcatggcaatttgacacaggaatagaaaactaacacaaaaggccagctgccttcaggtactgctgcatccgggtgctcagatgacatcaggaggccttcctgtctctgcgtctctccaggctcatttgcttagacttgttggtgcatttggaggatggctctctccttgtggtgatgacgcctccaggagcccctcttccttctcccagcttacctatcccaggggaaaggaagcctcctttgccattcatacaacagcccttggataaagtttcatttgaagggtgattttcacaagctcctccctaaaccaattgccacagcaaggcttaagccctggactgagcgagcagggctgggtccaccccacccatggatggagagctggggaggggtcgcttttccaaaggggactcaggacccagaaggagcagcaggtgctgggtgggaaaaccaagggtgtcccccacactcatgcatctgtctctcctgcagctcatggggcacagcctgcgctacctcctctgtcctggaggacccagtgcccatcctccatggctccaggatggagctggccctcccacagccctcaccatgggctgtggaggacagggtgttgaagggacaacgattcaggtcctgatcagacatccggctggagccctgacactgggcatctcctcatcctcctcggccatgactgactcttccttgtcatttctgagatggtggaagggagactttggagcatctgggcaggccctggtgaaatggctctactctagactttttgaaaaactaaaaaatcactttagggtcttagagagccatgcaagggagagacttcagtgtagctggatgaagacaaacttgggcacttggttgtcccttcagagctgggtctcggagctttcatggagtgccccggggaatacacaggctcaggagtcagaccccatgggctcaggtcccagctctgcctcttacagcgctgcaaccttgtataagttactttagctgtgcctcagtttcttcatatgtaaaatggatctgataataatgcccacctgaaagtgtgggtgtgaggatgaaatgagcgaacatgtgcttagtgtggtacatagtgagtgcctgctgaatgcacctgccatgatgctgagtgtgagtgcctgctgaatgtgacctgccatgatgctgagtgtgagtgcctgctgaatgcacctgccatgatgctatctgagtgtgagtgcctgctgaatgtgacctgccatgatgctatctgagtgtgagtgcctgctgaatgtgacctgccatgatgctatctgagtgtgagtggctgctgaatgcacctgccatgatgctgagtgtgagtgcctgctgaatgcacctgccatgatgctatctgagtgtgagtgcctgctgaatgtgacctgccatgatgctatctgaggtgtgtgaggatgaaatgagctaacatgtgcttagtgtggcacatagtgagtgcctgctgaatgcgcctgccatgatgctgagtgtgagtgcctgctgaatgcacctgccatgatgctgagtgtgagtgcctgctgaatgtgacctgccacgatgctgagtgcacatttctgctgagatagttaattcttaggtccatttcaaagatcaggagcctgtgaccaaatgttcagtacttctggaaaacacttccatttatgctgtctctgaattggcagcattaggaatgaaagagagataaattagatcatccaagatgattgctctgaatgccctcctcaggagctctttacagtgttacctcctaatgtacactgaaaccgtgcttggtgctgtcctagccaaggctagggaaagaagggaactaacctcctcagttattggcctaagcatctcataacctaccaggtagggcacaagatgttatatctgtgccgtttcctttactgttacatcaacttttgcggcatcacatgcattttgtggatgagtaaactgaagtccagggaagttaagtaacttgcccaaggtcacccagaaagtatcggagctagatttgaatctatgatggtctgcttccaagggccagaggatttcagctctacatcagttttattttttcccagagaaacaagagagaagctgagggcaccatctgcggtggattcgggctgtgggattgctgaatagtgtctacatttgtattaaggagtcattttgagagaacatttcgaaggctctccaatccatagcacagtgttttaccatcatttgtctccaggtgcattgggaaccatgtattcactccaggtggtttgagagggaatgtggcattgccctttccttgtttctcagaatccttatttcctctcctcattttgcccctttctccacaacgttcttttcaagactttgagtttgggcaagaatcgggcaataggttgcattgtcaggggcttaatgcctcagattttctaaggcagtcctgcttgccaaccttctgttcccggctcatttctgatctgagacccaggttgtgttggtggctttggtgactgcagaaccactgctctggagccattcactccacagtgaggttgacaccctgagtcccacaggccccctctattgcacccacactctgttgtgttggtgtggccaaagaagaggaggacagagaagcttccccagagatctctccatgctcctcacaagtggttttttttttgagatggagtctgtcacccaggctggagtggagtggcatgatcttggctcactgcaacctctgccttctggatttaagcaattctcctgcctcagcctcccaagtagctgggattgcaggcgcccgccaccacgccggttaatttttgtatttttagtagagatggggttttgccatgttgactaggctggtcttgaactctgacctcaggtgatctgcccgcctcagcctccccaagtgctgggattacaggtgtgagccactgctcccggccacaagtgttcttggctttgtttgtctctgcatttgtctctggggaggtatcacattaactttccatgtttgtggacttgtacctgtaatatgattacagtctatactttctagaattttctcagatcctccatagaacgacgtttttcgtggcagagattgtgtcttcagtgtgtcccaacagagcttgatctggaacctcacccagagtaagcgtggatttgaagcaccagggtcttggagatcctggaggggcttggccctcttagccaggcctgtgtggtggggatgccgaggggaggaatgatggatgggagagatcacgtgacagcacaggacactctcctggggctaaaacaacttcagcgtctgctgttgcagtttggccagcctggtggggatggaggtttggtgggaatttttttgtaagattcattaacctttttctcttcttgtttcccccttttcttttcctccattttaagcaggcaggcagtcttgctaatgtcagaagttagggtttggggtgatgtgaaagttaaggttaatgtttagcagatagtcaatcccctcgctctctgactgtggttaaagaactcatccctgccccactgactttgggcttggccatgtgacttgctttggccaacagaatatgagcgcacatactgtgagcagaggccgtgagtgcactgccacgagaagcgtgtgtcctggggagctgctgcctcttgtgcccgggtctagaagaagtcatgtgtcgtcaatccaagcccaacccgtagcctggagcagagctgcccttagaccgccccagatcatccaaaccttagtcaccctgcagactccaagtgtgaggacagaagctcgtgttataagccattgagtttgggcgatggtttgttatgcagcaccactgtgacaacagaagactgatatgggtggtgtctgctgggaggaactgggtggcaacggcaagtgaatcgaagaaggccgaagttattggcttttgcaaaatactgaaccagtgaagagatttgcccaagtgtccaggagggtgggagcctttggccagcagccaggtgggccgagccttctgcagagctgcgcaggcttgctgacgcctgtgtttggacagtggtggagacctggctgatgcctgtgtttggacagtggcggagacctggctgaagcctgtgtttggacagtggcggagacctgcattgcgttccctagagtgtcaggggtattgccagtcttgggcctcagacagaacagcctctactgcctgaggaacccctgtttgccagggattggtttaagcatctcctatgaccttactgtacctcctcagcaggtgggtgctgtcactggacagatgaggaaactgaggcatagagtggttaatcactgctcagggttgcacaagggataggtggcaacacgtggcgtggagtctaggcagtccgcttctggatgctatgctcatcgtcgctacactgcccgccccagtgcacctgagggactgcaagggccgagtggcatctcatgataaccagggactgagagcagaaagcttggcttccctcattcccaacgttagaccctggcaaggcctgtgatgtggacctcttctcaagttgggagaggaagaatggctgagatggcatttcctagcagcccagggggacggaggctgcagtcacaatgcagtggacttaaagaaaagaaagagacacagcctctcttacaccccggactcagcacagatgttcacccttgcagcccatggcgttggatggcaggcttgatgccacctgtctggcacaggcagcatttctgttggactcagggaccacaggctctaggtccctgcaggatccttggacatcactggccacaaagaaggggtctcccagatgtcacatgcaggtggccttgggctggagccagggccagggtctgacctggaactgcagaaagcagtatgtcctgagcttgctgctgactctggggaggaggcgcagctggccacggagctgccctgaagccgtcggaggtggggggaccacgtggctggagcacaagatgcacatttcctgagaatactttttccccaacactcccattgcttcatttttaaacaccccacttaattcatgtatagatctgaaatcacactgaacgggaatgtgagttttctgggtttgccaaaaggggacctgggttagcagcagtggcgagggggcctggccttgcaggggtgaaggtgaaggtgttggtgaactcagcttccctcctgcatgtctcgggaagatcatttcccggcccccatggttgaggaagagcaataaagaaccaaatctcctttgaaaggcatttgacaacatttaaactccgtcaggcagcctaaggatcattttcaataaattcatcttgagctaaagtttctgccttactgaattcatcttttgggagtgggtgtttgtccctgctgcagataattgtgaccctggatggcaggacctatgttcactgtgaaccaacttttcttgcgagggccccaaagaccccgagtgtgaatcgcccgagtgggtggggtctcttgccctgtgagtcctactaccaggggccccatccttccacccaccttcccccgggtctgtttcccttgaggtctgagctggggtgcccagtgaggggtcatccctgctgtgagataaaaccgaggtgtgactccccatccccatgcagggccctagaggtcatgcacggcttcaaccatctgaccgaggacggatctgactccctgctcagggcagcagctcgtggttcattcagccccagcggcgtctcgatgggggtaatgtaaggggcacagagaaccgaggattgggtctgatgggattaaacccccaactggtgtccctgtgtcttctctttcctgacaccagacaccaagaagaaacagccccaagcacatccgtcagtgcattccgaagggtgagctgggggccaggcggcctctgaagtctccacatgggttttgagcttttgcttttttgcagcagcaaatctgctctgggctgggaattggtgtttgctaaatgcacaggtggtctggagtgatgttttccttctttagcaaagtaacacatgctccttacagagagttagacatgcaaagaggcaggcatgttttttaaggataagttaaacattcagcaggttctcgggcactgagtgaaaggtgtccccacaggtcagcccctcagccccccagtttcttcttggagaagccagtgcagggccccgtgttgggggccggtgggtaggaggctatctcaagacaccaggaggcgattagagggtctcagtccattttgatacctgtgctcgggagtcgctggcttggactggactcctggcagcacccagtgagaaagggacaaatcaggctgtgactctggccgttttctcctctgcgactatgattcctttgctgcaccccctctttctggcccatccgcagagcacagacctatccttgccggctgacatttctctgctccctgaggctgagtgtgccccctggggatgctcagagagtgtccctggatttatttcagggccctcacttcttggaggagatgtcattccctgcagagctccattcacctgctctgaaccctcctcatcctgcccaaggacgtgctctctggtttggctggaaagaatgaccccaccatgccaactctgggattcaggcaaatcagagctgctgggcccaggctgcgttgtccagctggcccaggtgtttgtactgaaacacagctgtgtgcccactggttggtgcagagatgctgtctctatccctatggagaccctgtactggcaccccaagatacagcagcacaaggggcacaattgctggcccagcagaaacctggggaccctacactcgagctacggtcagtgtccacgatgactggccagctgccaagtgaacaaggacagaggcgtgggcagacgtgctgtggcctctcagtgctgggtgtgtgagtggccggagagggcgtctagatgccccaggtgtcttcacacccagaactgggtctgccagaccctgatggccccgagagtcctgaccagacccccgaaggccaacccaacatgctgggaatgaccattggtgccaagcgggccctgggcagctggggaagggctgtcacctcaaatgtcccactacctggctcctcctctttcctcagggacccgaatctgcccgctgggcacaggtcctcacacaaagcctggtccaggaaaaacaggaccacattgccaggcggcctgtccttcccctccccacaatctgtgctctaattacagaaatgacaggctcatggccagagacgccaagtaacagagaaagagaataaagtagaaaataagaatcattccccaacctacccccacacggagctagctgcattttaaataactaagcttcttgattgtgtctgtgtggaggcctgagttcctataaccgaggctgttttctctttttttttttttttgagacagagtctcactttctcacccaggctggagtgcagctgcccgatattgcgacctctacctcctgggttcaagtgattcttgtgcctcagctgggcaccaccatgcctgctcatttttgtatttttagtagagacgggggtttcaccatgttggccaggctggtctggaactcctgacctcaggtcatctgcccacctcagcctcccaaagtgctgggattacaggcatgagccaccgtgcccggccttgtctgttttctcttcatgagtgcccggtgtcaacgggagaagcagcactggcctgagcctctaagccaaagcgtccgggcacagctggggacaggcaacatggacccggtcactgtggtcctaatggtagattgtggtcctggttggcataggcagctcatcacggtctcacctgtagctgctttatggaaggtctgaattggataggagcagaaaacagcttcattgttctctagccgctgcattccagcagcttctgtgaggcaggggccagattagggtgagtgagtgaggccaagtcatgcaaatacagggtcatattgtgtcttagttgaaatgttgttaactttcccattagggttttttttttttttgcattgaatttaactttttaaaaaaattctgcactaaaatattatttattttgatcctgaattttttggtgcccccttaaattttatgcctcacttgctgcaccctgataatccagagatgagcgcctccctcccctgcctcgccctagtccccatcctgctgataggtctctggtctctgctccttgatgacatctggggaagttttcctaggattttggtcaccttgatttataatagcagacttgctaataatgagtggaatatggccaggcgccggctcatgtctgtaatcccagcactttgggaggccaaggtgggcagatcacttgaggtcaggagttcgagaccagcatggtcaacatggtgaaaccctgtctctactgaaaatacaaagattagctgggtctagtgatgggcgcccgtaatcccagctactcaggaggctgaggcaggagaatcacttgaacctgggaggcggaggctgcagtgagctgagatcatgccactgcactccagcctgggagacagagcaagactctgtctcaaaaaaaacaaaaacaaaaatgaatggaatagctcatgtttcggtgttacaaaatccaggccagacaagtctcaactttaatctcacgcccagttcctaggttagtcccttctccagctcaaattcagcctaagcctcaggggtccttggtcggggtggcaccacctgctcccttccccaactttgttcctgtttttaatctgctggggctgggtgcattcagaggtagggacaggctgaaggtcttcggctttttggttctgttgatgggtgagttccaaatactagctttctcttgtaggatatttcatttatttgttaaaaatatttatttagaacacaccattcatgtgccagacgctattccagccactggggatagggtgataaatgagataaacaaaaatactcgcccacgttaagctcctattctagggaagagaggaaaaaaaagaaaatacatgtgtacttagtacattagaaggttccaagtactgttaaaaaaaataaagcaggctggactcagtgactcatgtctgcaatcccagaattttgggaggtgtaggtgggcagattgcctgagctcaggagttcgagaccagcctgggcaacacaaaaaaaccctgtctctacaaaacaaaaacaaaacatttagctgggtggacagattgcttgagctcaggagttcgagaccagcctgggcaacacaacaaaaccctgtctctacaaaacaaaaacaaaacatttagctgggtgtggtggcatgtgcctctggtcccagccactggggaggctgaagtgggaggactacttgagcctgggatgcagaggttggagtaagccaagatcacaacattgcactccagcctgggtgacagagtcagaccctgtctcaaaaaaacaaaacaaaacaaaaaaaaaaacaggaaaaagaaagcagagatggggactagtggggagggggctggggatgagagcctccctgagcttccacagttcttcctgcccctctcctatctcactgggcacgggccacctggggcttctggttgttttgtgccaacttaatatgttgttcttgccaacagtcggaggccaactgaggcttctctgtcttccacaaggaacagcattggcctaaacctgcaggcaccattgcaaaggggagtcagctcaggtaaacctgctggtgaagcatgattccagcgtggggacacagaggctgatgtatcttgctgtaggtgatttaatgttgggcctcactatttcactacccctgtaagagtatgacacatccacgtccttaccagggcccgagggagggtggatagacttatccatcccataggtattgctcgtggctgggtaacttgcttatgccaacaagattttcatagacacggcacaggcagaagcctggaatgtgttggcactgccaggcctgccctctaatgctcttgatttttcccacgagacgagcgtgccccagggaacttcggctccagctgcaggatgagaggcgtgtggagcacgcagggttccaaccctcagcctggagtcaagcccagactagatcagcctaagcccagccaagccacgggtgcaggagtgaaaagcaaacgctaactgtccatgacattgactttcaaaggggcatgtcatgttatgtggctcatcccagcaacaatgaagatatttctccatcagtcagtcggtgaataattattgacaatgtgctaggaaggtggagtgattggagtagatttggtccctattctcatggagcttactttctagaggggaagacagatgataggtgaataaatataaattattctattaggttgatgcagcagtaattccggcttttgccagtaaaggtaatggcaatcaaaagcgggaggagccggagctgccattcattaaaagcaatgacaaaactgtgatgacttttgcaccaacctaatagaataaattacgagtgcgcaaaacgctgtgatgggaaagttccaagtgccaggatagcatctagcttcctggagtcaggagatgggggttttcaacctaagcaaggttaagtccaagtggtgggggcaggcggggggcgatatttcaggggagactccaaggatgaatggaaattagaaaagtgaacgcagatggtgaggggggacgggtttcaggcacagagaacagcatgtgcaaaggcctggggggaggacatcgtgtgttcatggactgaggggcggccagcaggctggagctgagccggtggagaggaggatggggagccggggaaaggcgctccatgcagggggcacagcaggggcaaaggcccggagtcaggcctgaacctgtgtggtttgaggaagtgacagaggcctgtctgggaggaaagtaacagcagaggggagaccataaggtcagggcagagggcagggccgtgctgggcactgtgggctgtggataggacctggcacgtatgctcgggtgaggggaacgtgttagaagattttaagaagggcaggaacatctggggataatgtgtattctaggaatctcaaccaagtaaattcatagtttgaatgttcacaagacttctgcacaggcaaagtgaaagatcgtttctagagctgtgagataagatcatagtaaaaaagaactactaagtttttaaaggttatttcaaatgatggatttccatcttacaaatgaatgcaagcaggttgcaaggttgatggaaagtagaaaagttttctgacttgcgtgaacagaaaagaaacatcaatttgaaaggaaaacatttatttatttacttcctctacagttttcctgactgctacatttcatgagaagggattgtttatgagggtcaaggagctggaggcctggggaggagctggtgtttctgttcaagtttgagggtcctggagctggagtccaggggaggagccggtgctgccactgatgtcttagggtcgtggagctgaagatcccagaggagccggtgctgctattctagcttgagtttcgtggagctggagacccagggagaagatggtgctgctgttctaatttaaggatcgtgaaacagaagacccagaaaggagctggtgctgccgctgctcagatctgagggtgttggagctggagacttagggaggagacgtcttgttctagtttcagggtcgtggagctgcagactgaggcaggagcattgttgttatagttcgagggtcagaaagctggcgacccagggaggagaggtcttgttctggtctgagggtcgtggagctgcagacccagggaggagcaattttgttgtagttcgagggtcaggaagctggcgacccagggaggagaggtcttcttctggtgtgagggtcgtggagctgcagacgcagggaggagcaattttgttgtagttcgacggtcaggaagctggcgacccagggagaggtcttgtactagtctgagggtcgtggagctgcagacccagggaggggcaatgttgttgtaattcgagggtctggcagctggcaactcggggaggagaagtcttgttggagtttgagggtcgtggagctgccaacccagggaggagcaattttgttgtagttcaagggtccggaagctggcgacccagggaggagaggtcttgttctattgtgagggtcgtggagctgccgacccagggaggagcaattttgttgtaatttgagggtccggaagctggcgacccagggaggagaggtcttgatccggtctgagggtcgtggagctacagacccagggtggagcaatgttgttgtagttcgagggtctggtagctggcaacttggggaagacaagtcttgttcgagttcgagggtcgtggagctgcagacccagggaggagccattttgttgtagttcaagggtccggaaactggcgacccagggaggagaggtcttgttctagtttcagggtcgtggagcttctgacccagggaggagcattgttgttttagttcgagggtcaggaagctggcgacccagggaggagaggtcttgttctggtttgagggtcgtggagccgcagacccagggaggagcaatgttgatgtaagttgaaggtccggtagctggcaccctggggaggagaagtcttgttcgagtttgagggtcgtggagctgccgacccagggaggagcaattttgttgtcgttcgagtgtcaggaagctggcgactcaggtaggagaaattttgttctagtttcagggttgtggagctgcagacccagggaggagcaaggttgttgtaattcgagggtcaggaagctggcgacccagggaggagaggtcttgttctggtctgagggtcatggacctgcagacccagggaggagcagtgttgttgtagtttgaaggtcaggaagctggcggcccagggaggagaggtcttgttctagtttgagggtcgtggagctgcagacccagggaggagccatgttggtttgaatgttgtggatctggagatccacggaggagctggtgctgcctttgaagtctgagagtcactgagctggagatccagagaggaaccggtgttgctgttctagtctgaacagatctagagttctggggagttgccggttctgcctctcaagtctgagagttgttgagctggagattcagggaggagcctgtgttgctgttgtagtttgagggtcatggagctgcagactcagggaggaggggtgcggttctagtctgagggttgtggagcttgagacacagggaggagctggtgctgctgttgtttaaggctgagggttgtggtgctggagacccaggtaagagctggtgctgctgttgtttaaggctgagggttgtgtagctggacagtggggaggaggtagtcttagtgtctaatgtgaggttggtggagctgtggacctggggtggggccggtgctactgtgtagtttgagggtcatggaactggagacctagggaggagctggtgctaccaccatttaagtcagagggtcatggatctggagctttggggaacagcccatgctgctgtttaactgtggggaggatgtgctgtgtccattgaagtttgagggtttgggagctggagacccagggaggagctgatgatgccattctattttgagggtcgtggatctggggacctggggagaggctggtactgctgttgtagtttgaggttcgtggaactggagacagggggaggagccggtggtgctgttcatgtctgagggttgtagagctggagacccagggagaagcccgtactacagctttttaagtctgagggtcgtggagcctgagacctggggagaggccagtgctgctgttcaaatggctcctttccgggtctccagctccatgacctttaaactaggagagcagcagcagctcctcccggggtcttccagctccatgaccctcacactagaacagcagcagcagctcctcccggggtcttccagctccatgaccctcacactagaacagcagcaccggctccaccctgggtctccagatccacgaccctcaaagtagaacagcagcactgactcctccccgggtctccagctctacaaccctcagacttgaggagctggagactcggggaggagccagggctgcttttctactttgaggattgtggagctggagacccaagatgcagcagctgctgctattctagtttgagggccttggagccagaaactttgtgaggagccggtgctgcctttcaaatctgagagtcattgagctggagacccagggaggaaccggtgttgctgttctagcctgacggtagtgaagctggagaccaaaggaggagctggtgctgctattctagtttgaggttagtggagctggagatcacaggaagagccggtgctgctgtttaaatctgtgggtccccgagctggagccctggggggagatggtgttgttcttgttcaagtctgagggtcatggggcttgaggcacagggaggagctgctgctgttcaagactgagggtcgtgtagctggagagcggggaggaggtagtcttggtgtctcgtatgagggtggtggagttgtggacctggggaggagccggtgctgctgtgtagtttgagggttgtggaactggagacctagggaggagccggtgctactgccatttaagtcagagggtcgtggatctggagcttttgggaacggcccgtgctgctgtttaactgtggggagcatccggtgtgtcaattgaagtttgagggtttgggagctggagacccaggagggatccgatgatgccattctattttgagggtcatggatctggagacctggggagaggccggtactgctgttgtagtttgagggtcgtggaagtggagacaagggtaggagctggtgcttctgctgtttatgtctgaggattgtagagctggagacccagggaggaactggtgttgctgttctagtctgagggtagtgaagctggagacccaaggaggagccggtgctattattgttcatgtctgaggattgtgtagctggagacccagggaggagtcggagctgctgatctagtttgaaggctgtggagctgcagatcccaggaagagccggtgctgccgttcaaatctgtgggtcttggagttggagccctggggtgacccagttctttcattcatgtcttaggatcatggaactggaaacctacggaggcggcggtactgctgttctagtttaaggatcgtgaagctggagacctggacaggagctggtgctaccgctgttcaaatctgagggtcatggagctggagtcttggggaggtgccggtgctgcctctcaagtctgagggttgttgagctggagattcagggaggagccggtgttgctgttgttgttggaggattgtggagctggaggccaaagaggagctggtgttgcagttcaattttgacggtcgtgtagctggagacctagggaggagctggtgctaccactgtgtaagttgaggtttgcagagctggtggccacggggaagagccagtgctatagctgaagtttgagggaactggagacccagggagtagccggtgctgctttctagtttgagggttgtggagctggaggcttggtggggagccggtgccgcctcccaagtctgagagtcattgagctggagatccacaggggagctggtgctgctgttgtagtttgaggattgtggagctggagacccggggcggagctggtgctgcagttggagtttgagggtcagggagctggagatctggggagcggccagtacagctgtttaagcctgagggtcgtggagctaaacatggagccaaagttggggaagcagagagagagagttacaggatgaccctggaaatggtagacgtagctgtaccccaagcaagctaagcttgggaactcctcaatgctagtgatgaatgcattctttttcctcttacacagtttggatttgttttctgtgtctcatgagacagaaagatcttgattaatacccttaggaattgaaaagcttaaaaaactaaaggatgttggtaataaaaataataagaattaaaccatgattatcctggctgacagagacaaaatcacacacacacaatatatatctttcaatcagttagcaaaattaaaaaaaatggaaaaatagacgcaagcaaagctataaaaagttgtttcatggagaagcgatggaggacagcgattaatctgagagttgctattaatggagaaactgagaacttaccatttttcccatgaggttttggtgtagaatgatattgtgtgagttctggcagctgagtcacttcacacagcccggtgatgcagtaggtgtcacagaaggaccctctcccagttagttctgcctcactgctccggtgagtgcggcctctgatccccaacagctgactgtgtgttgagaccacgcccatgagcacaagggtttccacggtgaaggttcctggatggaacactgtggatgtccctaatgttccttcctgatgttcatctgccatcttgctatttaatgcaatgtcttctaaatattgaatagaaaaaagtatttgtacaatatgggcaaggtataaagaatatccacacactggacacacagacagagaggggcacccacagcaaactccctttgcctgggagcaggtgtggtccttgagtcctatgttgcctgtttcttcctccgccttggcctacgggcccgatgtgatctgacctctgcctgcctctccgactccatcccccctcccgctcctgttctttctaacaattatgttacagcctcagtgaatgtgacaaggaccctgaatgacggtggctttactaagacagaggttcattcctttcacatgaaagtccaagccagtcgggtcattcttctctgtgcatttttcagggtcttaggctacttccatcttgctgctctgacttccttagggtatagcttcccccacagtgtccatcctatctactgccagccagcagggaggggagaagagaacaagaggacacaaatcttccttcctctaatggcagttgctgtgcactggcctcatgtgcattggtcactgcctggtcacgtggccactgcttgctgctaggggtgctgggaagttttcatcctggatgccagtgcccacctgggtgactcctgaggttgaggggagagaggacatgaaagagagtcactggctcttcccaccatcatgcatgtcgttccagtctagggcgacccactgcctcagcttgctcaggactgaggagggtcatggggcacagacctctcagttttataacagggcagtttcaggcaaatcatcccagcttggctgagactcagaattttcctgggatatgggatttctagtgttaaaactgagaaagttctgggcaaacctggacaagttggtgcctgccatggggcctttgcatctactgttacccctgtctgggattccctttctgcagctctgtgtggtgctcactccttttctgttgaggaaaggctgctctctgggtgtccccgggtgcctgttccgctctactcagcactacatgctctgtgaatatccctccatgcacttcgtagaatgagatctgttctttccacccttgcctgcccacttcagtttcaaagtctctgaggattattcatttttattctcttcagcactgaaagatacatctctttccctaaggctgtggctgggttcacgcatagttagataaatctgatattaataataacccgaatgaaaaacatgtattgaatcccaagattatgatgtaggaagcacggattctgaagagatgtctaagcctaataaaggccaaagggtgtggattaaaaggaaatgtggggtggagaaacatttcatgaaatagaaccccacctcttgggtgagttcgttggtacaacttttctagagggcaattttgcaactggccaatgaaggtgagtaacttttggtcccaaatttcatttataggcattgatccctaggaaatagtcagaaaaatatgcaaagatgaatctcaaggatttttataagaagaaagaagtaggaagcataaatgcccactggtggtcccacaccctggcaccagtgctcccctctcctagtgggcgggcacaggctacattttcccaggcttccttgcagtgagttgtggccatgtgaccaggttctggccaatgggaggcaataaaagtgttgggtggtatttttggagacccccttctgtaacttctgtcttgatatggtttggatgttggtcccctccaaatctcatgttgaaatgtgatccctgatgttggaggtggggcctggtgggaggtgttttggtgatgtgggcagatccctctcacaatggcttggtgccatcctgatggcaatgactgaattcttgctctgagtttatgggagatctggttgtttaaaggggttggcacatcctcctccctctcttgctctttctctcgccatgtgatgtacctgcttccctttcaccttctgccatgattggaagcttcctgaggcctccccaggagcagatgctggtgccatgcttgtacagcctgcagaactgtgagccaattaaacctctcttctataaataaccagcctcaggtattcctttatagcaacgcagatggactgacacatatctttaatgtcatttcttagttgttccatcctttgacctgcttcctggaataagcgtatgatggttggagctattcttgtcaccttgaaccttgaggattaggcttctaccctgcggatagcagaatgtcctctggaaggaaatgaaagtccctaacgccaccctagactgagaacctccagttttgtttttacttttttattttttgagacagactcttgctctgttgcccaggctggaatgcaatggcgtgatctcagctcactgcaacttccgcttcctgggttcaagtgattctcatgcctcagcctcccgaatagctgggattacgggtgcgtgccaccatatttagctaattttttttatttttagtagagacagggtttcaccatgttgagcaggctagtctcgaactcatgacctcaagtgaaacacctcagcctcccaaagtgctgggattacaggcgtgagcctctgtgcccggcccagtcttggttttcatgagataaacttctgtcttggctgaagttaaatcactgataggtgatatgaccataactggataaaaagtaggaaattcatgtaatacttatatctacatatgcccataccaaaaatgatagtgatctgttgttatctatgtgtaaatatggacacaaaatattgtttagtgtaaacaaagctcttcttttttttttttttttttgagacagagtctcactctgttgtgcaggctggagtgcaatggtgagatctcggctcactgcaacttccgcctcctgggttcaaacaattctcctgcctcagccttctgagtagctgagattacaggcacatgcaccacatccagctatttttttgtatttttagtagagctagggtttcaccatgttgtccaagctggtctcaaactcctgaccttcagtgatccgcctgtgtttacaggcatgaaccactgcacctggcccataaagctttattctattttaatgaagcaaaaatgcataagtgtgtaagtgtgatcatatgtgtgtgtatgtctaacaggagcactacatagcaaaatgcgaatgctgcttatctttggtgttggtatcacgtgtgatttaaaatcttttcttctatttttaaaaactttcaaaatgagtcatgactttgattattagaaaagaaatctataacaattgagaggaaagaaaaccccacctgttgttgaaactggctggagctgggagaaatgagagattcctttgcaggtgtcacctccctaccagaaaattggccttgcaggaatgtcccacaagccagatgtgtctctttcccccagtccctgtgcctggtgtgaggtcgtacagacagtgagcatccttcacagagtctgacctgccaaggtaggggggaagtgggggtttagtgacattcaaaacccgggggagccgaacaggtgtgactgtatgtttgcagggtgacctctcccctcaaagagcaagaaataactctagtgcaatttccaaacatttacaagagaggatttttaaacttttcacttctttattgcaactagcacatttggaaggataaaatacagaaagaagtcctgctatttacaatcaactttcactaagccagtgttatattcaaaaacagcagataaagctcatggctttgatgaaaggggcagtcttttcattggaaacaattaatactgctccccgttctggggagaatttaaagaaaataatttggaaggggatatggcttgatacaatcaaatgatttcagatcacaaatgtaatcatttgatcttgctttaaaaccaaacatttcagaacaatctagcatcacattctcttctgagtctgtgaaactctgaattctgggtgagtctgaattcccaaggcaggactgaggatagaaaagatttgatggcagaaacctggtactgtggttatcacgtgggttaaagatgtaggcttggttaacccactgaacctgcttatgtatgaggctcacctgagaaggtgatatggacaagcccatcttatgggtctgagggctcttcaccaggagtggagcaaggaggatggccccagcgtccccgtctctgaacacgtttagcgggagggctgtagagcctggacagatcaccactggctccatggggaactttcagcagcactcattgcctgtgtctattctgtgccaggcactgcgctcagggcagggatttgggattcaccagggcacaaggcgacgtgcgtctgtcctcacggagcctaagtgctggtggagacggacagtgcagatgccaaccgcaaatgacgaggcacttgcaggtaggggtcagcgccaagaaggaaatgaagggtgcgtgtcgctgactgagactctggtgggagctacttaaatagggccatgggggagggcctctctgaggaggtgacatttgagctgaggcctcaccaatcagaaggaaaaagctgtaaagggtctgggattaactcaacctggggacttttaaaataatgtaaggtgttacagctcttttagaatttgtctagcacgttttccggttgtcactcccaggtgggctcgggaagaggcatctgtgccagctcgtggcctgttctttgcacttgtggggaaggggtccccttttcccacagccgtccccccggggcctgctcccaggtggggtctggttttcaccagaaagccctccatgcaaaaacaaaaaacaaaaaacaaaaaaaacccaccacacaattgaatttgaattagttgccagcatttacattttaattctaaaaatctgtattttcgacttcgttggaaagtcagactatctggccaggctgggctgggatctggtggagttcagtattttggtttctggttagggagggtatttggggtttgcccctccagcatctgttccagtgtgaagtgggggtggaggcccaggctcagtggggggatctgcagtggccaagggtcttggctgtctccagatggccggatggacgctgccccctcctgcttggggtgtgctggggttctttgctgcccctcctcccagcccacagcctcttgaactccacggagaccacccccatgtgaggctgggaagggaaacctgcctttgtaagtggaatcaggtgaaatcgggctgtgactgtgtcagtcagaaactaaaaggccctgtcacacccgtggccaggaagactgtcaccatggtggcatggaaatgacagagacgtgtgggacagcgtctgccaagagacgagccaggtgagggcaggtcgtcatgaaggagggaggtggggtcctccccacagagcagcgccatcccacagagaaacagcctctggggagggacgcgttccaaggaggccccgtgcagtgcagagtgggtggctcgaggcctgaatgccgggcactcggagcggtcagtgtccccgtgggagcagggctgctcgcagccaggtgattggcgaccttggatggtcagcccctgtgtgcgtgtgagggggtggccctctcctctgtctcttctgaaggcagcagtaaaggagggaggccaaagagctcagtgtcagacgagcctgggtgcaggtcccactgcctgccaggccagtgcctctgagcctcagtttcctcatctgtatagtggggttaatcccaaccatgtatactgtctgcctgccatgtgccaagcccttctaacacatctttgattgcctgagggcagggactttattatccacctttagagttgagaaagaagaggcacagaaaggttaaaccacttaccgggggtcacacagctgctatggcagagtaaagactccagactcaaatggagcactaagccccgccctgggcgccaacaggtgctccaggaatgtcaggtgccatttatcaccctcatcacctactgggagcgctcgtcccatcatgcaaaccccgtgagcgtgaagtgaggggacacgtgcaggatcgagtgtactggcgggtaatgaaagtaaagtaataaccacaggatgatattcacaacccacagtagtgctatcaacagccgcatctgcctgcttctctgggcccaggattgcctgcaaactcccaggaactggtcctaggtgggtcagaagaagggtctgacgttatgggaaggagcagcttgcccagctcatggcctgtactgtgcattgggagtccctgcccccaacagctgtcctccagggcctgctcccaggtgggctcaagaggccacagagctaagcagctttaggccagggttctgcgggttactgtgtgcctgtgggagtgacacccccacccccaaccttcctgccctgccagctgctggacacacagcagctacagggcatgaaccctgagaccaggacctctgtgggtcccatggcacagagccccctcctccctgcccgactgagaaggaggaggcgcgcctcagggtgaatcctgccccccctcccccgctcactgcaggataaacggcctctagatcgaacacctcacaacaggatgtgtcttagcgtggtttatcaaatcacaggctgtgatgcattagtgggtcttgaaatcaatttagagtgtcaagcccggcattgaaaatctgcaatagaaccagaatagactaggtcaggaggcatcagagcgcgttgtgtgcagcgagggtgagtgtcgtttgggtaaacgtgctgcgtatctgtataaatggatgtgcttgtgtgtggtgggtggcagtttgcaatgtgtttttaggtgggttgcactaaaaacgttagagaatctctgtctcaccgccttacggtaacacaaaggggaatcacctagtagtgatcattttcctcagaaccttacatttccctgatttgagaccgtttataagactgagaaacaggtctaagctggtgccaagagttttggttacgtcagggataaggctgtggctctctcatcccacagtccatgctgagggctggaggggaattgaactgcaggatgaagtgatgaacatgcaagaaatgagaccgggaatgggagaggcttgcaaggcaaacagagatggggagaggaagggacgtgggtaggggtgggtgactgtgagggagagaaagggggtgaggggttatttatgaagctctaggagctgccttcctagagtccgtgccacctggactcaaacactcattgtccattcaatgaccccttggagcttaagagctctgttaggatctgaaatgtgtccagcagatcttcggagccattgaattttcatcccatgtgggatctggacacatatgcatgcaaactaacatccttacacatatgcacacacagatacacatgcccccacatactcatgcatccacgtgctcacacacagatacactcacacatatacattcatgcacatgcatgcatacaatgcccacacatatatgcacactgatacacactcacagacacactcatatgcacacacacacatagacacacttatatgtacgctcacacacatgctcactcctacatgcactctcccacacccacacatgcccacgcactcacagacacagtgagtcaggtgtatttaatacgcagttcgtgcctatgcctcccccagatccccatgtgacctgctcgttagaggaggcccggagtccttgggggagccctggtgtcccgccacctgatctccatgacaacccatcccgacaccggtttgtgagtgtgaaagcttcagggcccacaggacctcccacgttaattcatggagatcagctgttcactactcaatgctcccaagttatgtgaggcagcgaggcacaaaattggcatctgctgtggtgtgtgtgtgtgtgtgtgtgtgtgtgtgtgtgtgtgtgtgtatgtggtgagcttggtgcacaggtaggatgaggtttggggcaaaagggcatgaacgatacagccaatagtaattgggttacagttgttgattgctttcaaaggacttaacatagaatattcatcccaaagatatattacatctggtgaattctagagcatctcacagatagaatgggggtaaaaggagaaacaacacacttgcaaatttgatgaaatttcccacatggtcctgaaatcgctggtggaatgggggattgcagtccgggtatgaggcattcgagagaatctgaatgtgtctcccaaagtgctccccagggactagcactgatcaggccgtggaaagcccaaggtcccacatgacaggttctgggctctgccttccttgaacacaggggtggaggggctggggagagaggcagagtctgagaatggctggagaaaatggtcggattcggttcttttatctgtagcagggactcaaacccagggtgtcctggctgctggaaggttgaacaatgctgagccgtatttccacacatggcttcactggctgaagcagggctgtcctgtggctgagaacccctcttccagccctgcatgggtcccctgacccccaggcctgcaggcattcacatacccccctgcaaagcccccaaccctccttgggcaaggacaggcacagcttcaggacattgtcctcctgccctatgtgggcagagttgagcccccagagcagagagggaggctccccaatacccatctccccgataatggccaatgcgcctcaaagggtcacttccaaagaatgccaggtggcaggcaccaggttttggcatctgatacgctcccatccactccctggggacctaagcaatcatcctttataatctctgacggggaacaactggccgttgtcctttaattagcaggggacacactaagctatggtctcctgcaggctccataaacatccgtgaaatcagcctggtgactccaagctcggtgcagactgcgggggcccacagaggccaaggggagcccccgcccccggtctggctctgagaacagcctccaggagaaactgccaagccacccggactcatggcagctgcttaaactggcaagttctttcttgcaaattgagatccaggctgcgatctgggctggctctgcacattccagccacctgttttacctgctggttggagctgccttggtacctctgagggctgcttgtgtgtgggtgggggctgcttttgaacacatggctgccccgtgggccgcgccttctccacttcttctggccttataaaatgatggttattgcagggaggatgcagggccaagcatcctcttatgtagcgccgtgagatgtggggtgtccagtgtcccaggagaaattcaagcctcatttccctctgagacactgggatggggccacgtgcagcgtcttagtgcctggatcccaagtgtgtcgtctgagtctgtgcatgaggggccagggccaggccttaggctgtgtaggacggaattgaagcatgtttgatgggagggcccaggtcacacccaccaggggccaggagtgcacagatgtagatgccaatgccagcccaagtcacccaaaatggcgaaagtgagctgctgggaaaccttcgggccagaggctgatgacgtggaatcctggaggggactgcctgctgctcagggtagaaggggacattctgatgcggcacccgtgacagccctccagtgttcccgccacccagacccactgtccctggagacctgcagagggaaccactgctgacgagaaagtgtctccgtcacttgctttgtttccccttggtcactgcaaacacatgctcacagccctcgggtgacaagcctctttccgcccccttctgatgcccctgctctatgggtgttgtcactgctcctggcttgcagtgtcctgtgtggctatgacaacctgggttcctctcagggccggtgtccctcctgcagaaagctcaccctgtctcctgggccctggccctgctcctggacagaggagggaaggactggggtggtggctgatggattctcatgtcacctctttcccatattcccctgggctcttccttcagagcctccaccctgcaccctgatgactcactgtgtctcatgtaggaagcccccggtgacatctcatgccctgtacacaggtccctacagcccgggcccctccttagctctgctgcctctgggggaaaccccactttcagccctccccctactccttacatctggcagggattgcagggggcttgttggagggaagccacatatgagactcacacgatgcaccaacgcccactgtgcagaccgcaccccatctattttcttccgtcccttctgcagtcaacacagccctggctctgcattcggccctctcttcacggggctgtgtctgggcagatggggctggaaaacaactcgctgggcccagctggggtgtgttgtgaatgtcacagcccggcctgtgcaacaggaggctccaggatccctttaggggtagggtagggggcgggagagtgcagattaaatgggatgggcaggggcaggaaggcagcaggggtgattaatttttctagaatcgttgccaggctacctttcaattccttgtctgtggcccaggccaaggaaagcgaatgttctgctgccaacctggcttgtcttttaatcataccctttgcttgtcagtttagacacccggtatactctcattgctttttagcaatctttgcaacttgctggacttttccacccaaataagaatcatgtgtactgtgtgccaggcactgtactaaatgcattagctatttcaatcctcacaatagccctatgagatgggcactatcattatccttattctgtagacgaagaaattggcacagagaggttaattaactagcccagagtcactcagccagtgagtggcagaactgagatttgaacctaggctgcttggcttcagggtctatgctcttaatctctcactgtaggggctcttaagtgagtcctcagcttccatggcttcagttgaagggacttctctgtggaggcagggccaggaggaagtttatccatgggtcctacagcagccatctagaaggatgggattggttgtgactcagactctacccttgctgctgcctctgtcaggagctctgtcccctggctcatcccaggatctgctccttccccctcctcaggactcaaatgcagcattgcagaggatgtttgctgagcacctgctatctgccaggcactgtgttagatgtaggggatcttgcaacaaacagaattcctgcttttatggagcacacattcagtaagtggagagggataaacaaatcagtgaaaggtatgcatgtcagctgctaatccatgctacagggagacattcagcaggctgggggataggaagctccaggtatgtgggagagtgtgttagcttcctgtggttgctgtgacaaatcaccaccaacttgatagcttcaaacaacacagatggactctgtcctagctctggaggtcaggagtctgccgtctgttttaccgggctaagtcaaggtgtcagcagggctggctcctgctggaagcactgagggcaggattctttgtgttttcaagtgtttgtatttttcttttttcttttcttttctttctctttcctttctttctttctttctttctttctttctttctttctttctttctttctttctttctttctttcttctttctcttccttccttccttctctctctttctcactttctctttctttcttttctttcctctctctctttttcttttctctctctctctttctctctttctttttaggcagactcttgctgtgtcgcccaggctggagtgcaggggtgtgatctcggctcactgcagcctctgccttctgggttcaagcgattctcctgcctcagcttctcaagtagctgggactattggcatgcaccactatgcccagctaatttttgtattttttagtagagatggggtttcagtataagttggccaggctggtctcaaactcctgacttcgggtgatctgcctgcctcggcctccctaagtgctgggattataggcatgagccaccgcacccggcctgtattttcttttaagctcctcatattcctgggcttgtagccccttcctccatcctcaagcacatgattccagtctctgccctgtcatacagctcctctgactcagaccttcctgccctcctcttataaggacccctgtgattacactgggcccacccaggtcatctagagtcatctttctatctcaagatccttcacttaactacatcagcaaagcccctttgcaatggacatacacacagggcccaggggttttaatgtggacacatatggggggcccttgttccaccccctacagaaggtggttgttgattttcagtaggatggtcagggaagaccctgctgagaagccaccatttgagccaagactggaggagctgaggctgtgggtcaggatgacatcgagggtggagccttccaggcaaaagaacagtgagtacaaagccggcaacaggtgtgctggcatgttccaggaaaaccagggagggagccacagctgcggccgagtgaggagaggagcagcaggaggtgaggccagagaagccttgggggcagaagctgcgggcctcatggttatcatgaagctccgggttttactctgagtacgcgggagccatggagagttctgagcagaggaagcacaggacctgacctgggtttcacaggctttctctggctgctgtgtggaaaataggtaaatagggcaagcgtggaagaagggaggcctgtcgggaagcttttgcacaatggcccgggtgagaaagaatcatggcttggaccagatgctgggatgtgtcccccacatccctttcaggagcaggcatgcatgccccactgcccagggggttgcctgctgagagctcacagctgagaccctctccagaaaatgcccctggctgacaggagctgctttgcccagtcacccttcctacggtccctgcatctccaaagactggtagtaaacacaggggtctaaaggtccagccccttgactcgattcatcacagctctgaagggccgtcttcgctgcagacttcctcgaaggatggattgcaaagtcatgcgtagagtgtgcagggctcaggtgactatctatatgtctgtctatattttaggatccctgtctacattagcaatttgtttaaaaatatatttcaaaattcctgtgcccacgtgaggtctagtgatttatccatgaaggtatagaataacagatagagaaggggtacttatgtggtttgttgtccgacagatcgtgtgaaagtttttcgtcatgtccaggcaccacctcttcctggtcaggcccacgttacatatgagaacaatggaacaagtcaaaggtaaagcaacaagtccccctgtaaaaaactatcagtgtaaccgtccacttccatatctgtccagtcagttaacaaatattgacagaccacctttaaacacaggctgctgtgctggtgtctgggacacagcagtgagtaagagccatctgatctcatgacactctcaggaagttccagtctatgaggatggacagcatgcaggtcaacacataaacatcattcagactgtgaaaaatgcaataaaggacacagattgggagatgggataaagagtcatgggggtggagctactgtctcattttgggtggtctgggagggcctctctgaggaagtgacatgtggacagagttctgaagaataagaaggggctgccatgggtgatttgagggaacagcatgctaggtggagggaatagcaagtgtaaaggccagagatcaggaggatcaaatatgaggccagggtatccaagaagtcaggacagtgctaagagatggggatgcagagacactgtgaggtgagatagaaagagaagggagtcggcctggcacggtggctcacgtctgtaatcccagcactttgggaggctgaggcaggtggatcacgaggtcaggagatcaagaccatcctggctaacacggtgaaatcccatctctactaaaaatacaaaaaattagccgggtgtggtggtgggcacctgtcgtcccagctactcgggaggctgaggcaggagaatggcgtgaacccaggaggtggagcttgcagtgatccaagatcgcgccactgcactccagactgggagagagagcgagactctgtcttaaaaaaaaaaaaaaaaaagagagagacgggagccaggcatggtggctgacacctgtaatcccagcactttgggaggcagaggtgggcagattgcttgagcccaggagtttgagatcagcctgggcaaagtgatgagacctcgtctctacacacacacacacacacacacacacacacacacacacacacacacacacacacacacacaaagccagatgtggtggtgcatgcctgtgatcccagctacttgggagacaggaggatcacttgggcctggaaggttgaggctgcagtgaatcaagatcatgcccctgtaatccagcctgggtgggtgacagagcaagaacctgtgtccaagaaaaaaaaaaaaaaggaaaaaagaaaagggaagagaattgtcacattttattgcaatgactgtgttttatttcagttaaaaaattttctctcccctttgagtccagcctgacactcaggagatggggagagccttcctctcactctgcctcaggaggagctcgaacctgctcccttaaatctccatcagctccggcaagcccttgggctctgctggctgtaacgctgctccctgtttaccagaggcttttgctggcacattaaatgtatcactcataccctgaactagatcgagccacagaaagctttgattcatggagctgctggtccccgttaccacaagatatgcattctttctctttgttaaggaattaaggtgccatattgaaactttaatctttaaatacaggtaaataaaacatgattactctacagaaacaggaccccaagggaaatatgtgtttaatagctctagcatttggggcaataatttccacattccattctgtttgtataatgtattatactttccaaaaatattttctcatgcaccagttcatttgtgctcatttaatatgtggaaggtatttacatgttgcacatatttatagcagttttcccaaccaagtaaaaagagaaaaagggaaaagaaaaataaaacgcctgcaggtcctcagttgcatgtactttctggtcagtacaatgaactcacatttgcattctttccttgtctcttatttcatccttttctttctccatggtgtgtgtttaacattaaccataaaccagttcttctcctctctctttcactcataaacatgtaggggtgggcagcttttgctcttgtccatccaacattcattcctccttctaattgcactgccctaattttattctcagcaatgacccctcccctcttcaatccacgtgtgtgtgttgactttactaagaccccagccctagatttggtctcatgccccagacctggacaatcagtgtattctctctctccacctccactttcattctcttaggtcagagtgattcctgggtggccaatgaaactttggtttgatttactagactttggtttgatttactagaaagaacacctctctttttattggattggtttctgtaagagtgtaagcagggccacagagcagaaacttcttgtttgtgaaggcactgcacaggaaaatagagccttgtagacatcagtcatttgagcggctggatgcagccatgcctgaagccatcacccttagggcaggttttctcaaccttgagactattgacagtttaagctgggcatttctttgttgtagagactgtcctgagcattgccagatgtttaacaacatccctgacctctactcaccagatgccagtagcatgccaccctcccacccgccactcccatcgtgacaaccaaagatgtcttcaggtgttgccaaatgtccctggggagaaatttcctccactaagaaccaccatcctagactgcccataagttatgcaggtcaataattatccgttttgcttatttctgcttgagtttctgttcttgtcttcaaggggctttctgcccgaaggagagctgtacctttaggatggaccttccaaaggaactttctctgaattgcccagtgtggatggtgagagggacagtctgcatttggtcaggtccatgagggagaaatgtaccagagagaaagtgttgagtgagcacttgtttatgaggtcctgaaggatcaggagaggaattgatccccgtagcctctcatgcttagggaaggcttcctggaggaggtgaatcttacagggttcataggggtagtaaagagggaggacaggtttgtgtatgtgtatgtgttggggggaacctgtgagcatgaaacaggatggaatggggtgggtgggttggcaggaggtgctgaggagatcatctggccaaagccaaagaggggtgtgtcaggcaatcatttgcattgggctgacagatgggtccagagtcaatgccaagctaaataagttagaatttaaacgtccaaaacatatttaccaccatcaccatgtgtggtagaaaaaatgatggtcccttaaagatattcatgtcctcacgcccagaatctgtgactatgttacacagtgtgataaacgggactttgcagaggtggctaagtgagggaccttgggatggggagatggtcctggattatctgggggagatgaatgtaatcacaagggtccttgtaagaaggaggcaggaggacccgggtcagaggtaatgagatgatgcgagcagggcgaaagaggaggaggtatgaggacgaaagtggaagggggagtgatgtcgttgcttccttaggagtgggaagaagggccatgagcagtgtaatgtggcagcctgcagaagccaaagcaggaaagtcagcagcttctcccccagagcctctggagggatgcagccctgtggacccccagataataaatttgtgtgtgatttttcaagccactaactttgtggaaatttgttacagtggcaataggtaactcatatactgtgcttgcccaattagcatgcaatttgtatgttattacttgatttttttttgtttgaattgactctatttactttactccaaatgaagatttcaccctcggtgttcatatctgtgaaaacatggggttgatggctgagtatacatttttccccaaaatgaatggaaataaatacatgacttaaacatgactttaaaaaacttgtttgtccatgttacgtgtgaaatcatctagtgtcttgctggtggtctggtcacatatactttggactcattagtgggataaggagagttgtggaagtcttctgaacaggggagggaggtgatggaaagtgccacagtcttagtagactccatgtagatggagtgctttggatgtgttggcaaagggaactacagccagggtcagcggggaggggttccaatagttagcaagaagacatgaggtccaaactgtggtggaggatgggaatgaaaaaagagcaaaagagccaatgggaaacaaaggaagaatgatcaggatcattactgatcatgaaactgacccaatagtcccacagagagttttttttttataaacatggaaattggcctttctggtcttaaagcttgaaacttatatttgttttatctgagttccttcctcaagaaaggatccctaggccttcaaaagtatcagagaactgaaactcacagattgccacatgcagacaatgaaatacattcaagatgattgtttctttgcccctccctaactcctgtttgcttactcattgttacatttcttctctgctgtataaaaacccctagttttagttgatcagggagatggatttgagactgagctcccatctccttggctgcagcacccgattaaagccttcttccttggcaatactcatcatctgagtcattggctttcagtgtggcgagcagaaggacctagaccaaacccctggtgttttggtaacagtcaggttgctgaaaggtccaaaactaagtcagaaggaattgccaaggaacaatggggctgaaagtgtcaggaaggattgtctgatggcaagcaacagaactcaacttgggctgtactcacagaggagaattgatcggtaggctatttggcagctcagagaatcaaaagaaaggcaagaaaccaggtttagaaaaagaataagaaccgaaaccatgtcagggcatggagagtaggaagttatgggcaggcccggaagggcatcactggtcatatgaatagttcttggttgtttctgtagcccgtgctgcttctgttaagatccaaggtccagagagggctgggacctcccagctgaggtctcatgcctattgtttggtgaggggagggcagggcacttcaatttaccatctgcctcagacttcacaacagggaaagttaattctccaaaacaaagtctgaatgtcaagcacaaggtgaggtaaggctgagtcctgaaagatttggccgatgaaggaacaatgagccctgtttagattcagctggcttttgacttacctagagtagccaagggtggtagttctaatatggtctggatatttgtccctgcccaaatatcgtgttgaaatgtaatcctcaatgctggaggtggggcctggtgggaggtgtttggatcatggggtcggacccctcatggcttggtgctatcttcatgatagtgagttctcatggtatctggcatttaaaagtgtgcgtcacccactccccctactctctctccctcttgttcctgcttttgccatgtggcatgtaggctcctgcctggccttccgccatgactgtaagcttccagaggcctcccaagaagcagatgctggtgctattgcttcctatacagcctgtagagccacgcaccaattaaacctttttgctttataaattacctagtctcaagtattcgtttataacaatgcaagagcagcctaatgcaagctcctagggcccttatgcagatgacacctaaatagggcctgaatgactgccatgattaacgggacaccctatgcagaggagccagtcctagagtgcagccaagtagttttatggtctgcaatgatgttctgaggggcaagatggaaaacatactggaacctgcctggtagtgagaaactgtcccgtgagcctctcagggagagagggaggtgagtggaagatgcctggggtacctcatgttcctggaggatactaagacattctgccaagaatccaatgagccatggttcaagccttgcctgcatggcttatgttgatatgtgcaagaccataagggtgccatggcagatttgttcccctgcattattttgaaaagaagggtaatatgtgttgggaggttaaaataaaattttgccactataataaccagtccaaaacaactccagggcttcagtcatctgggaaaatggtcggtagctggccagtgggatcccttacccaagtagacatttctagacattcccacatgtctgaagggttggcattttggagggcacatatccaagatttgtggctggtattttgtgtagatgtggcagacacttaagggcactgagagtgacaaagctgacttttacatcaatctcagagcaggggagggtagggctgagcaggatcacagctgaatctgaaatactttcctgggaaacccccaccctctcctcaggtgtgtgtcttgtgttcacaaggatgatactgggatcctggtatttgggggtttcatctgagagaccctcacacaaagaactttctggcactctgctgttctgatgtggaataatcctgaaagtgcgatgccagccacgccacatgtcacaatgagaacacagagagagaggggaaaagagagggtaagacaggtggtgggaagtggatggcatgtatcagtggctcacttgggatttaattcctgacgtcagtaagcttcaggagagctgagacctgcggccagctacaaactcttaaatcttccctctttccaagacagagctgtattagtccattttcacactgctataaagaactgcctgagactaggtaatttataaggaaaagaggtttaattgactcacagttgtgcatggctggggaggcctcaggaaatttacagtcatggtggaagggaaggggaagcaaggcacgtcttacatggaggcaggtgtgtgtgtgtgtgtgagagagagagagatagagaactttaaaaaccatcagatctcatgagaactcattcactatcaggagaacagcatgggggaatctgcccccatgatcaaatcacctcccaccaggtccctccgttgacacatgaggattacaattcaagatgagatttgagtggggacacagagcaaaaccatatcaagatccaaactcaccatctcaataagggaaaggctgggggcccctaaacttctgtcctcagaaggggacccctaaactcacttcacccttgggcttgaagtaaattctggaatgggactaagatgaatcaattaacgttcttcccctgggctttcttgaggggggatgccaaaactctgaaaaatcaagataaatattattgtaatggaatagtttacatgtcaaaaccaaagcaagaaaatccacaaataacaaaatgttaaatctttaaggacaggatctgtcgttgagattgatgcctctaatttcctgattgctaaaccaatcctattcttaaaagtactatgatgagaaccatggcttattaaaaaaacaaaaaacacccatcgtggtggctcatgcctgtaatcccagcactttgggaggctgaggcgggtggatcatgaggtcaggagttcgagaccagcctggccaagatggtgaaaccccatctgtactaaaaatacaaaaaaattagccgggcgtggtagtgggcacctgtaattccagctactcgggaggctgaggcagagaattgcttgaacctgggaggcagaatttgctgtgagccgagatcgtgtcactgcactccagcctgggtgacagagcgagactccgtctaaaaaccacaacaacaacaacaacaacaaaaacacaaaaaacaaccctaacgaactaatttatatcagaaacaaacctgtgatatattttctaaagcaactgaacaagattttcacaatattcaatcatctgaatagatactatgtctgagtcattgaggggaatgcccaactgagttaacaggaatgatcaaacccgaattcccaaggcaaacccttttggggttcataaatccagcccccagaaatcttgcaaattgccctctttgggtcgacgcctgcccatctgtcaactcgggatcctcactctttcctctgtcccaaaggaccctcctctgtgtcttgcaacacgttccagaagagaagggtatttctcaggtctgcagaaacccaaagaagaaaattcgtgttatgatctgaagggagatgaaaagcatattttagcagggcattgcaaatgcattccgtgctcatgacagaagcatccaaaatacctacattatttagaaagctgcaggagagggaaaaatgaatgcagaatatgtgaacgattcattttgttttttaaaaaatgcagccgagccagaaaaagcttcacaaatgatccaaagacaatataaaatctcttctgtttgcaaagtcaacacggtaaagagatgattaaacgaaagcaaacctgagacttaaccttaaaggaattgagcattttaattttttaaaaggtggaaaaaatgccataaaagcatgtctgaaggttaaggaaactgttattaaaatgagaattatgagctcggagctgttcgcagctctgtccctggagtgtgaaattagtgactgaaggcagatttcacaggcacttcgttggagcgtgttggtgtggcagtggatttgtgatggggcctcgccgccaagtcctgcccacttgcaagctgctgtcgttattcatgcacagcacagataatcatgaatgtctggagcattttgcatttatgttgaatgcagcctctctccttcccagccggagtgagtttcgggctgtgtgcacgggtgaagtgcaggggaggaagcagctgcaagaccagcattcccaccaaggccatattttctctttgaagaaaaaaatccttccatatggattacattcagcagaaatgttggaaaatatatagaaaataggaatatggtttaaattttaaaccttaaaatagctccaagggcaacaaggaattctctgggtctgggtttcaggtctgaaacaattgatgctaatgatgtccacattccccatcacaccgtgattttggaaagttggtttggggaagtttaacagaagagagaaaactcaggaaacagtgaattgggagaagttgttgcatttcctcattctctctccgtctgtctcgttctcatccacttagtcacacacggcaaccaagcaaaagtgtaaatattacttttcatgcatttatctaggcatagttaggcaagcagaattgagcaaggccccaggtaaagggaccctttgaagtaatagcacttttttggctgttttgttggtcaatttttgggtgcattatgcttttaagatagaacttaataccaaccattaaaaaaccacctccttttcaaaatgaatattctcccttgtatggcttctttggtgatggtaagatatttggcacctcccaagtgtggtttgaactttgaacactcttgttgaaaatgtgagaggaaataaaaatcagctcacagctctccaaagcatactgcaaattaactgtgtatcgggatgtttttcggaacaaataacagaaactcatatggcaattggcttaaacaattacaaaatatgttggttcatataatctagaggtgatccagcaatcccaagatgtcttcacggatcagaccctttccatctctgccctgctgttctgtgttgactttatcccaaggctggacttcctcctgggtgaagaagaaatcaggtaacctttgcaagcattctcagaagagcaagcagggagtttcctagaaaccacaagcgaacccatttttgaatcttcttgacctcagttgcatgatatgtgtgctcttgaccaaaaccctatcaatggaatgactgggatcacccttagaacagtgttgtagctaggatgggagcaggatgaactttcttgaatccctgggatgcagggaaaacaggattcctgaaaagtgaagaactgggtgtgtgtgtgtgtgtgtgtgtgtgtgtgtgtgtgtgtgtgtgtgtatggcattgaaattttgggtaggcagtcaacagtattcactacacctatcagattccaaaggtatcttggtcaccttgattagaactctaaatgtgtttaatgtgtgtatgtacgcatgttcacattgtgctgaattggttagaatttcaaatggatttggcattgttctgtatggacatggcttcctcttaaagttcctcaattgatccacagggattaaaaccattcaaaccatgggtaactttgggctggagggaatcaaatctctgttcttcttgggagcttcttggagcttctctgtagactggcttcccttgctttctggaagcctctgccctcacttcactctgtcttgcctatgatttgggctgagaatggcacagggaagcctcctcttcacatgaatttaagctccagaatctaccacttactggccatggaagtattgcccgatggctggactactcacctacatggagttgggggtaaggggtcagctgaatgcacacatcttgattccaccccctcagctgggcatgtgacgtaagcattatacacacctccaaattgctccaccttagctgagagcatgtctttcttaactttggaaaccctagagctgatagttgcatactggtcatttagtaataactcacttagtgaataaatgaatgaatttattgacccatgtggtctaggactagaatgtaaacttaatgagagcagcagtcatgtttgtttttcctcattacaaccccagtgcctagcacagtgtgtggcacccagtagacagctaatgaaagttatggaataaacaacctgcagggcagtcagaggatggaggttgagcacctggaatcaagtcagagagcagggttgaatccagacctcaccactttctggctttgtgaccctgggcaagtttcctaaggtctctatgcctacttttttcccacctgtaaactggggataataagaacaccagattagagaataattccggaagatttcaccagagaacacttgtaaggtacataacctatcgcatggcacgtggtaagtgccatagaattattcactattatcactttcttctccataacccagcttccatggctgtaaacttttctctgtcttgttcactgctgtgtcttcagtatgcagcacagcacctggcatatagtacatgctcagaaaatatttgttcaatgagtgaatggaattctggagacatacaaaatgaggatgttaaggattagaccaaataaaatccaccattctagaattctgtggattgaaattctaagagctactcaatgaatgtgttgagttgaaagtatttctttggttaaatggtaactctccccctcccccatttgtctgaatgcccagatgttgacgcactgggagaattttgggagggcacaaaacctgtacaggagccacttctttcactttcgggcaactctcctgagagaccaaaatctaccctacaaaatcctatatcaaccctttgctttgtcattccagttgcgataggcgggagagaaatgttccgttttaattctgtggaaggtaaagcaaagcaataccctgggatacttgtaacagtccaaaacattcctgaaataaaacattggttctcaagagtgcaggaaatcttccattttcttaacatgtgggaaatcatttaaaggcagccatcttgccgcttaattttgaacttccattagcctttaataagaagataatcagtcactgcagatcttgtcttccctacctccataggaaatagtcctcctgccattcagagagaaaaactatttattacatctcaactatgtacttgtcagacacctttctatgcactggggatgggaatgtgaaagtaaagctaattcttttttcgaagaccctcagaatcacacaaaagccaaggtcatgtgtaatgtgtggcagatgctgttggtaccctgcccgcctctcctaggtactcactgttcctataaataaatgccagtgacatctactgtgagcacctgcggctctccgcctaagaactttctttggttgttggagtgtgctcagcctgtgtgtggggcaggctggaggtgccagagagttaatgccccagggacagcccctaatcagtgatggaagtgagctggtggctcaaaatcccagtttctttgccctttgagtgggataattcaccatgttcttcacagccttcaacctgaactgcctattctagaacgtcgtgcctattaagtcaccttggatggtttcctttctttttcacatctcaatttcctattcccctactgttccttttatggctcccaaataaatgactttcactcaaatttgtcttcatgcctgcctctgagagaaccctacataagacaatcagtatggctcttcctactcaagggacgaaaatctcagctcaaggttgcttgaataaaaggattgcttgaatcatgctgtgattcacaggaaagcccgggggacatattggcttcaggtatggctagattgaagcacttaatcgtgtgaacactgagtttctctctaattctgaggttttctttctgttgtatttgtttctttctcaagttctattctgtggtcctaggaagtttcagtctcttcctttggttcaaaggaattgcctgagaattagcttcacattttgtcaaagtcttttccaatagctcacatagcaattctgagttttgctctaattttgatttcctatctattcattccttatgaatggattttcctttatgtcctttagcatacctataacagctactataaaatctttgctaatttgaacatatgagttatcttcagataagtctctattcttatttttttatgttgagtctttgtcatattttcctgcaattttgcattatatccagaatattgtgaccaatacagtaattcttgattccgttgttttcctgtgaagactgttgattttttgagcaagtgactaaagtggctgaactcaaattgaaaagatcttgcgttcagttactaaaggtaaaagaaaaaaaaatgaaaaggtttgtgtttcctggagtgggaaatagctcaaatttcagttcaattctgtggcaaccctagctgggctacttgtagtctgcctacacatatgtggtttagggaccagctagacatttgaaaagtttatacataaaatttggggctccctgtctctgatgtctctctgcatttgtaatttccctgctccattccagtggctatggtttcccagagcctggtcctctggttcttcaagtgggtgagatgactgatttttagttggagttttagttgtccctcttttgcagactgaaacctcctctcaggtgaaaatctgtccaagcatcaactcccctcccatatctgtctgcctttcttcattgtcctgtgctttcaggtcgttgtttttaaaattttgtccagagtttatagctgttgtatgtgagaggactcgcctcccagaggcttacttggccataaaagaagcataaggcctagtctcaagattcattctgattggaccagcttaggtcacatgactatacctggaccaatcactgtaatcagagtaatgatatataccaattggtgagggcttcattcttgaggccaagggacgggccacaccaggtcatgtgaactggaaattgggaaggtaaacatccacaaaagctaataacgttgaaagaaaagagaatggatactggtcaagagactacaaagtgctctggatgtgtttgcagatgttcagcatatattagcatttgtccagtgatggacgtctgaccactgctctcgtagggtctgagagaagacatctcagaagagggatcactcaagtagggcctggaagctcagatcaggagctgtcagtcaaggatcgaggacaaagcatgcagtctaggaaaaagcatgatattttctacctcaacctgtcagattccttttaaacatggctttacagctcacactcatgaatcttctttccacgtttttgcttcacctaagaccatgatatttgaaaaaaatagaaaagaaaggaataaataaacctctgaggcaggatgagtcagaatgacttcattgtctctcctctcagttccatatattgaaaagaggatgaacaacaccctttgcatttccagatgtggaatattttgctgtatcaatttgtgttctctcctctgtgatgacaactcttatgatttatgataaacaaattacaacttaatgtaccaggtaggattatctgatcccgattactgctgtgagtaatagtgctcccagtcacagacatctgaacagacgtgcatgtacttttctcccacgtggtagtctgggcgatagctcaaggctggcatgtgggcactagttgaccaagcacccagggacctgatttcttcattcgggtttccctgccaggtgtggcttctattctcaggaacagtacatggtccaagatggcagctccagctctagcctcagccccagacgtgttgccccccaagcaaccagaatgaaagaaggtatgaagtcaaaaaggctcaaagcatcaggtttcttttcaaggaacattccaagaagctgtcacacctcacttccacttacaccctattaactctgttaaattaaataagtaggaggtcattagcctgaggctttctctgtactttgagttcttccataaagctctgcaacctaacttagtatataaacaaactgaaacctaatttaggagtgtagattttttgtaacagatacccagatctcagccaatcaccagctgccaagtttcagccaatcagaaactgctgagcttcagccaatcagaagtagccaacaggtcagaccatgtccaaataaggcaaatgcctaggtgtaatcaatcaagttaattttctactttatttatatcttctgtctataaacacttgctctccaccttgctgagttgagccctcagaatgtcttcaggttctgagtgctgcctgattcttgaattgttctttgtccaaataacctctgttaaattaactttgtctacaggtttttttttttaatgccttcaaagccagggagagctgcagcatgttttttggatgacttcaatattaaaaaagattcctgaatactgcgtagtactgttggcgctattgcttccaccactatgactactactgggataatgattgttgtgctagatacacctctaagcacttaacacgttgaatcctcttaacagctccagcatgtagatactattattgttattccaagttacagaggaggaaatgggagcagggagaggataggtaacttgcccacagccatgcagctggtaagtgtcaaagaaaggattcaaacccaaatagtcttgttttagagagtacactctaaaacactacttgctataattactgcaaacactatctgattggaaattcctttgatttatttaggagttttgatccagtagtttttttcccccacaggtcttttaatttaattaatataaagtatattatgagtattttcaaatacacacgaagtataggagaaagtgtaagaaacttccatttatttacccattacccagctttaacatgcgtggtaaatctcatttcatctctatgtcaccttatactagtttattttcttttggattattttgaggcctagaccttgtatcatttttatcataatactttagtatgtgtctctaaaagcgaaagactccatattaaaacacaaatataataccagtatcttgcctacaaataataagcaataattcttttaatattatcaaatatctagtcaacgttcaaattttcctgattatctcataaacttttcttgagctactttttaaaataaagattcaatgaaggcccatactttgtttcttccatctgttgttagtctgtaactttcctaacatcctgtgtgtgtgtgtgtgtgtgtgtgtgtgtgtgtgtgtgtgtgtacatttatttcatgttctgatgaaaacttcgtgtcttataatggatccttcttcaaaagtttgggggaaaaaaacctgctctagagaatttgaacactgcttttttttttttttccatagccaattggattacttcccccttgcaaacttctctgactcagatgtcatgaaaatcctggcccaggagtcctgtctgactcacagggaccaggaaattctacccctctctaggggacaaggagggatttgtgtgattttagggagcagatgatgctgtggaaaatactacaggcctcaactcttcccctagttataaagtctgctgactccaaagtgtgccccatctgctcttcctttgattctaggggcagacataattacataaagtaggacattgatctttttgcatttttaaagccagagtcatgtctgggaaagccaagtctgccgtatctgtaataaccaccttaaaaatgcaggaaggagaagggacgtgcatggagttgaaaagtgtcgaatgcaaagcaagtcagtaattatggcacagagtgagggcagtaaatgtgcctgattatgcaaatccaggtggaatgtggatgccagtggtgttctcatctccagttaagagggtggctgtcagcacgagagtcctggactgagggagtaggagagaggggccaggccagaaggggcaggagccccggaagctggatgtggtcctgggtgggcacagcctcaagcagtgagggccctgcatccagggacagctaggtatggagggtgtgcaggggcccccagatggaaataaagccccaccagcatctggcaggccacccaggtgagtagactggggccccaggtaggaggcacctgaggctgggaagatgcttcccaaattgtgatctgcctgtccgtggtggctcatgaaatgagttagacagcaagaaaaatcttgctatctgatggttatgggtgtatttgaatgttatttcactgaaacacaggggactggtgatgggtgtgagctctgcagcttgaatgcctgggcttgaatcctgactctgccatggacttttcagctgcgtgactcagccctgctgtgcctcagtttcctcacctattattatatgcatatgcatataataatagacctacctccaagagctgtggggagaaatcaataatgagctaggaaagtgtctgaaatgtagcaagaagtcgatagataccagtggttattgttgttgttcagagaggtagttgagaatttagactctggagttggacaatagcgagtcaggtctcacctccctggttttctagctgtgaggccttggataacctctttgtgcctcattgtcatcatctgtaaaatggtgacaataataatatcttcctcatagggctgtggtaaagattagacaagcgaccgtatggaaagcccttagagctatggatggcccatggtaagtgctcagtcaatatgcacagccatcattagtattactagttcttagtagcaggctacattatacaaatgatccaacttttatagtccatttgaaaaaaaaacatgttaagtaatcgtagaggtattatccaggagtggcagagaaactgttcttatggtaggctagccctgaagtttgggacatagaaaagcaggcacatttgaagacctagctggtagttcatatcaaggatgtaggtaaaacatttgtctatgaaagcaccatgtctcagttatctagagccacataataaacaaccacaaactagtggttcaaaacaacaaacatttcattatctttcatggttctgtggggtaactgggctccgctgggcagttcttctggctgcttattttcagctggtgctgcaaccagagaaagggaggagctaagaagacacccagggttgtagccagagtaactggaatggtgacatttccgtttgctgaaatggggtagactgtgagaagaataattttggggcctgaggttgaacaagagttcagctttgttaagatcatgtttgaggagtccagtgggcagttggatatacaagtagagatctcaggaagaagttggggtaggactgaaatattttagaacgctcagcatagaatgagtatgtaaaggcttcagtcaggatgcgatcgcctggggagtaggaggcctaggaagacacagatgtggaaactgaagcaaaggggttcaaggaattgccttgtccacagactgttgtggaggaagctgcactttgagttcaggacgtctgggctctctcccaaatgatgaccgaaaggcagttgggccaggatgcctgaggatgtcggaaactcatgcgcttctgaaggctcttctcaactagcagcaaacccacagatgagctggtgtctctgtgttccaggccagggagaatgtcttcaaatacctcttattccttcctgggtggatatctaatctgatatgaaaatagagtccaggcgtggtggctcacacctgtaatcccagcactttgggaggccgaggtgggcagatcacctgaggtcaggagttcgagaccagcctggccaacaaggtgaaaccccgtctctactaaaaatacaaaaattagccaggcgtagtggcaggcgcctgtaatcccagctattcgggaggctgaggcaggagaatcgcttgaacccgggaggcggaggtgcagtgagccaagatcacaccactgattccagcctgcgtgacagagcgagactctgtctcaaaaaaaaaaaaaaaaaaaagaaaaatagaattccacttttccttaaacttttatgatgtacaccttatttatagagacaaatatgcctggcagaggctgggaggtgggtaagggcaaggagggcctggacaaagaggaggcccaagagcagtggggaagtgtgggggccctggcttccacctgcctgggtcccagtcctggccctgccacctctgggctgtggactttgggtgggccatctcacttctctgctcctacatttccccatctccatcctgagcataattaataatacctgaatcagatgtttgatgtgaagactgtattactttatgaatgatgtttcccaaacagtggcacatagaaggcatctttatgtgtattttaggagcattagcttacaaagcggggagccaagagacattgtccacagttggacaacgaaataaagatgttcaaatccttaaaatgaccaggataccccaaaatagaataatagtaactaatagtaactagaataacagaatagtagtaactaacatttattgtttactacatatcatacagtcttcaaattggtacttttgacattatggagtaggaactattattgtcccatttaatggatgtggaaacagagacacaatgaaatgcaacagctcctccaagtttctacagtagtaagtgacagagctgaccttcaaatctgtgcagtttaccttcacagagccatctttgctacttccaaagtaggcggtaaaaattatgctactgggaagagccctctgctaaatccttcgtatgttacagcagcaagccagcaaccgatttctacagctggccaaatgagagtgtggagcaactggaagtcccatacattgatggtgggaatgtgaaatgggataagccactttgaaaagtgttttggcaattaaaaaaaattaaacatgcatctctcctatcacccagcaattccactctgaggtatatctacaagagaaacaaaaacatgtcaacaagaatgttcataagcagctttatccataacagccccacactggaaattacccaaatgtctaccgacaggggaatgagtgactaagctgtagtcgattcacgccgtgaaatactactcggcaataagaaggaacacactactgatccacgcaacaccatggataagggctgttactcttgagatgtcttgctttcagaaatacggacatggttcagaaactatcaaaagtggttggccctggatgtgacggaaggtgagggggcaggggccaggaacggttgttttactcttccagcctttctgcacttctggtaatttgaaaaactgcatgctatttaatttcatcatgcttccaaggtctgtttctgctttttagccaattgactgccagctgaagtctagttaaataactggcagccccacttcttaggttcagtttggacacttagcgtccaacttggaggagatgaatatcaaatgcatgtaattacataacttggcccaaagtgaaggaaatgaattatctaggtgaccaggactgggtggctgtggtccaagagtggcggggcagaagaactcattcccgaggagggacgagttgggggcatctcacatgaaagtgaccttgagaataaagccccacatctgcaggtcacctgtgtcctctgagaatgtggccattagttttgacagcgcctcagccaggagcctataaatgaacgaaaaagactactagagaagggtgctgttttacataaattgaggattgtatgagaaaatagtttctcatgctgattggcaccgcagtctctggtgtattcaaaatgcaaatgaaaacaacctttgctgaacaggactctttgcatctggaatgcttcagacagtaaatccagaacttcaaagacaagagaaattaggggttggctgcccatattacataagatttatcatttttacaaagtagcagatcttggcatgtgatttgtttcacaaaaactctatttagacacctccttccgtcctcttataaggcccgcctgcagtagtcaacctggccatttcctgtgtcctgtccccccattgccatcccatacactccatggggacagggctcttctctgggtctgtcatcattttattcccactgctcagcacagggcttgccccgctttagaagcccaggatatatttcttgtgtgaacagtgttaaagaaaaaattattcccatgcttgttaaaataataaggaagactttactcaggacaactacaatagctgtcaagatgattgtaatagggaaaagattgagctcaattctgaatacaagaacacatttgggtttatagccaaggagcaggttgcaaggttgtggatggaaatttaccaaagagacatcaagattggagggattcttgctggacttgaccaagtgaggttctggctgacggcaggccagggtgaccagatatctagggtgggcgttgaggggatgctttctaaactgacttatcaggattcttgctgaaattgggctaggcaagcctggcaaggatggggccgaggtaaaggtctggttgagaagaaggcttagaggacctgattaacgtttggttaaggagagagtctttgtcaaaggctgaatgcaaggtttctttgtctcgaactagttctttaggttttcaagtgcatcattattaatattttaggtcgacattccagtaagacttgtcttttattgggtttctgcttgtggtttattttctttgttatgtgttgggttggggctcttcgtaagcaacaggaactgactcaggctgcagagtaaagcagtttcaactgcatttgatgttttggtcaccctacctaagatgcagcttctaagaggagagcacagattggccagtacgggacttgtcaccttgattggcaggtcctccagactgtatccaaggcggcaagctttgttcccccaaagagaattgggatgctgttactggagaaacagaaacaactgaggaaacagtggttctcaaccctaccagactaactcaacagccacctttatgacaaatattgtataaagcctccttacacttctgaaatgaaattcataaacaatatgacctacctatatacaaaattgaagaaatcagactattgtcctcgctataatgtcaaggagaaataaaaaggaatctaacttgtagaatattgcttataataacaataacaaaacaatagaattgcacaaaattaatgcatatatgtgcttggggacagatgtgctacaaggcataaaatacgagtgaaatatttgcttctaccattgatgaatatgtctggacttaaaaatgcaagataaccaaaagtcatcctgtctaagaagtacagaaaattaaaaggcagaggaggagtgaagaaaacacatttaatgtgcattaaaagatgcatcaaatgctttgtgttcctatggagttagatttgaggctcatttattataaatagagtttttgtctgcgggaatatccagaaagacatttaaaagtcatggaggatgcaagataattatttgttgtgtgggattgttttgcatgcgatggtagtgatagcgtcctgtgctcctgtctactaaatgccaggagccctcgtaaggaaaatatggggaaaattttgaagtttagtgtgtgtcttgactagctcatcaacccaggtgatctttgtcttcattgtctctaactagactattttctagttctttatagatacaagtctatttgtagcaaattcagagcaatgcaattcctgtccatagagatgtacattatgtctagtcgggttcaatgcactcccttcctccattatgaaataagcccgttttgcatctactaatcaaatgcatttcagcattcctaatagcctataaatgtgtctgctctttgaatttccttttgaattggttttaaaacctttctacttccctcatccattactgagttaaataaaactgttgacacatattcttttaatatttgtttgagagtcatgattttatctttaaaaattaggctttgataatttcaatcattgtggaaccaaaaattcacccctcataatttcaaaactccctagaaaacaatactatgcccactgtgagtcactgcatctcacacacacacacacacacacacacacacacacacacacacacacacacacacagagaaatgataaacctacagatactgaatttattttctcttctgtgtatcgtgtgacctggtagttgactgaatgctatatcgcccctgttttacaaatgttctactttggaattttagggtttgaaactggaagctcaagatgggcacctgcagatcacactttattcatagccatttttctttaaccaaaatcctcggctttttggctttcgtacgaggagaggaaaatcacagttccagagatgaccggacactcttcaacacttttatgaaagggaattacattttgtataattctaatcttctcagccatggttgtttctttgttgtggggtatttttaagcatcaaaaggaagaagaaggaaaaaatccagagaccacccccaagcctgaaatcctgttaaacctcacacaaaaccaaagccaacagaccttgacagaataagctcataaacgaacagagcacagtcttaggggtgagatcctgtgcggtccttcataagctcaattcctcccatctggacaacgggggacagagcaggtttcctattttccaggtattctggttggctacttgccacggaaagaaccattctttgatctttgggtttagtgctcgttttcatagctccggtccttttacaaggaaggggcagaaatcatcactcaaggtaggcagcagaacacgaaagaggcgtggatgttttttgtgccctgttggatgaaattagcatcctgacaaagaaagttcttgctaatagatcagggggtcacggtagggaggatgagatctctttcctaaaatacttataccctgatcaatgtaggacatatttccaatactgagaacagcttctaaagcatttttttctgaagggttttatgatattagaatactaataattgctagcaaatactcaaaaatactaaaaaatcccccaaagtgtggtgcgaatgcacgatggtgtgtgacccgtgcatcagctcccatgtgttgtgggtgtgcacctcccgtgctccccggtatgcctctgggaccacctgcttcccctcctggcctccttccctccagccaacaaccccggccccttattcttcctctaagaggccaaactcatgcccatcttggcttgtttctactctctgtttacacctctgcaatgctctgtccctgggagccaaatgacatactttccctccctgtgatgaattcaggtttcttctccaatgtcctctctctcaggaggccttcctgaccacctgtctaaagtaactccttggccaggtgcagtggctcatgcctggaatcccagcaatttcggaggctgaggtgggtggatcactagaggtcaggagttcaagaccagcctggccaacatggtgaaaccccgtctctactaaaaatacaagaattagccaggcgtggtggcgggcacctgtaatctcagcaacccaggaggctgaggcaggagaatcgcttgagcctgggaggcggggaggttacagtgagctgagatcacgccactgctctccagcctgggcaacatagtgagaatccatctcaaaataaataggcaagtaagtaagtagataaataaataactcctccatccctcttgatcctattatcccaccttatttttttcatagcacttttcatttgacgttgcaggtgcttctcacgatacaatgaggccacgtcctgacaaaaccactgtaagctgaaaatgtattaaatcaaacagttgttaactccagctgctccttgggttatgatggggttatgtcctgataaacccatcataagtagaaaatattgttaatttgaaaatgcatttaatacacctagtctaccaaatatcgtagcttacttatcctagcctaccttaaacatgctcagaacactttcacaccattgtaaagttgaaaaatcattaagtcaagccatcctaagttggggatcatctgtattgcatatctattttttaaagttggttattgtctttcttcccattagaaggtcaagtccaagagggtagggattgtgttttgttcacaacgctgttttgctccagtgcttgggacagaagatggtacatagtaggacctcaaccaatatttactgactgaatgtgagtctgcttttctttgaagcaccagcctagacctgcctccttcttgatcctcttaggatgcccatcagactcagttcctcttccctcagtggcctcatcgtatgtttgtggccaacacatgctttttgaggcctatggctgggaggctagatctaggaagacaacagaattcctgcctcccggagccgacattctcacaggggaaaatggatattaaacatgtggtttgtatctccatctagttcttaaatttccttctacctcattttatatttactttgatcatttgttcaaaaagcaatttctctgtgtgtgtttctcttaccatttgaaaaaactgggtgaagcactagggaaactgaactataatagagacggagggatcaatgtttgggctaaggatgggagtgggacaacaagggagaaatcagagaaggcttcacggaagaagtgacagaaatagaaggatgagtaagagttcaccagaagtgggactgagagggagaggcacctgggcggagggagtggtctgtgtaaaggtgtacaggccaaagagctgctattgatggaagagagcatcatttgaaataccctaaaactgatcaaactttctagatgataactcagcttctcatgtcccaatgcaacgcaatccaacctgatccaacccaaactgacccaatctgattcaatccaatctgatttgatccatccaatccaatcctggggtatcttttgagagctggccaagtgcaaagcattgtggaggatgcagagaggcacagagcacaccccttgccctcaaggcattctgggtctttccaggaaggctggtatttacaggcaaataagaggaaagaatctgatttgtgtttaaggcatcacaggacgatgggcaaacacacacggcttggagatttgtgcccaattcacttggtaagtgaaaagtagcaaaccttattagatagtggccaggtcatccatccattcattcattcattcactcactcacctgacaaggatgtattgagcacctacaccacgtacttggcgcattctaggtgtctgggagagggaggtaaacaggaacgatgagacccttgctctcatggggcttaccctgaaaattcaccaaaatataggtgaacagctgagtaaataagaccttttcagagcgtgactgtgctgtgaagaaagtacagcggggcagtggactagtggggtgtgggagcagcaggatgggtcccccccttcaatgcagtatctggggagaagcccctctgacctctattagggctgagacttgcatgtggaggacaaggtgggcatgtaaaggtctgccagagggcacagcgagttcaaggctgggaggtggggacagccacctgggtgtattttggggaacagaagggccagagaaactgtggggaaagtgacatggctttattctaactggagatgcaatgaaataaatttctcattttcaactcactgcttgcagggatccattcttcccctaactggaagactgtgatatgtagaaagcactgacaaggtttaatttaatttagattgttgaagcccatcaaattattccattcccaccccctgggcccttttctttcctgcccttgaatctcatcttccacttggtcctttgacagggatgactcgccttgtgacgcagagtccctaagccatccaatttcctgcgcattattaaaattgttaaaacacaaaatccaggtacagttgttatctctcttattgatccatacagaaaagaaacagccaagaaaaggaaaaaaaaaatcacgtgaccttggatccatatcagctcagcacagctgaacaaaggctggggaaattttctggttgatatgtgagatttcattcttggaacaatgatgcttccaaacaatgataccacccatggcttttgtatatggagggctcatagaggctgtctggtgctgaggggtcagggaaggaactgcttctgcacaggacattctttgtttcagcggcacttagtgagcacttggtgtgtaccgagcatggctctaagcacttcacaggtgtgatctcattgaatctgcctgacagcccttggagaagtgatgttattagctccatttcacagataggaaaactgaggcctggaatggtgaagtgtttcctgttcatcatagagtgagtaagagatggcacctggattaacagcagtctgtttcacagcccgtgctggtcagcccacctggttgactgatgcagctgggcgaccttggtccaggtgtttcacctccctgtgtctcaggtttcttctctggaaagtgaggacgatagtcacactttcccgatgaggctgttgagaggatcagatgggcgccaggagcctggcaagggctgcacagctacgagctgtcattgcatctgaaaacctgccattggaaaaaaaaaggcagatgatcttctgtgggagccacaaaaatcaggattccaagatgcccccacctctgcctatacacggggctgtagctccaacagtcacagttagttcactgagatcagcctcccagatatcacataggccgttctccgtggggggttaacagtctcctagtaagtgcttcacttgcggcttctctggagttgctggtgtgtgtgtgtatttgtgtgcttgtatgtgtacatgtgtgcgtgtgtatgtgtgtatatatgggtgtgtacgtgtgtgtgattgtgtttgtgcatgtgtgtgtgtacccgggttacagaaggggctctggggtcagatggcctgagatttaaccccactcttcagctactcattagcccacaacctcaggcaaatgacttaaccccgtggtgcttctgtgtcctccttcatgctgtcgtgactatcatagccccgacctatagggttgatgtgaagattagatgaattagtctgtatgaagctcttagaaggggccctggcacaggactggtgctggacacatgtcattaccacccatgatccccaggcgtctaccgcacaccagctctatgcaggaccctggggtgaatgccacatagaccccttcccctcaggcagcgccagcctgggtggagggggagtgttccagccccactggtaactagctgggtggcctgggccagcttcttcacctctctgtgccttcactcgcctccggaaagtggggacgatagtcacacttacccgaggatgacattgagaggattcaacaagcgccaggagcccagctagggctggttagctatgagctgccattcctatcattgtcatgtctctgtttgttctctgtccttggccgcttcactgttcctccagcaatctagatgcgttcctgcctggtggtcctgccgctccctctgcatggccctcacctcccctggatcttcatttagtgacttctggtcacacattgctcccttgggaggcctcccagccaggccatccaatggagctcttcatccaccactggccactctccagccaacagcagcaaactacagctgggggacaaatccagtctgctgcctgtttttgtcaataaagttttattgggatacaaccacttggatctgcctgcatatcatctatggctgccttcttgcttcaggggcttggttgactacttgcgacagagactatatagaccagaaagcccaaagcattttctatctgatccctctggctgcatggaggagatggggtggatgttggatgttgggtgaggttgtggggagaccttctgtccttgcacagcatagagaatgctgagggttcccagacactgggcctgcaggcagagagattatgtagagcaaagctgagtcttagaggccaggtaggccctgaccgttccaagggtgggtcacatttctggcccccagcattgttctctgagaaatggaagatttaatactctgggactcagataagggcccttctgcctctaaagtcttgcgtgtctgcccaaggtcatgctgcccatgacttcacagaaagttcgttggctcctgttctgttctgctatcccatttgatttccatcaaccctgagttgggttcccagaaacagactctgggatgaggatttgagagtaagaagtttatttgggaggtgattccagaaaaccctacaggggagtggggcagtgagatgggacagggggtgtgctatcacacaagtcccctgcttcacatccatcattggcagagggccgcatctggggcgtcagctcccagcacttcccaggggccaagagaagccctcagctagagcctggggcttgtggtcagatacctgcccagcaaggactcgctgtgtgtcgagggcatgtgggctacgccagcagctctcacaccatcacagcaacgattattttccaaaggcatttagttaagtgaattgcatgtctatgcctgtttccctgtctgattggggcctcatcacctgggccttcatggagggtgggcatcgacgaacactggctgagggcagcaggggtgtttctctccttcggtctctctgccttcacaggattccatgctgcccctgcccctgcttatatctgatcttataagcaggaccggatgtcatgattctaccactccttctgttcatttctagttctttttggttcagtagttgtgacagagacaaccttttcttcactgatttccccttttatacgtgcaaattgggagtgaccccatggtctccaaggctgtgtctgtcccagatttgtagcacacaaaactcttccaggcatagccacattcagcctggaaagctgaatgcattgaatgattcctctgggatccttcttcttcttctttttttttttttttttttttttttttgagatagagtcgtgctctgtcacccaggctggagtgcagtggtgcaatctcacctcactacaatctctgcttcctgggctcaagcgatcctcctacctcagcctcttgagtagctgggactacaggtacatgccaccacacccagctaattttttgtattttttttttttagagccatgttacctaggctagtcttgaactcctgaactcaagcaattcatctgcctcagccttccaaagtgctgggattacaggtgtgggccatcctgcccaacctccttctgttcatttctgaccaggcatggtgaccttgcctgggatagtgaatgagccaagacactgagcaagaaactcagacagcaacatctggttcaagatttacccctcatgggttgtgggagcttgggcagacacataagactttagaggcagaagggcccttatctgagtcccagagtctcaaatcttcaaattttcagacagggacgttggggtttggaaatgtgactcacccatggaacagtcagggtctacctggcctctaagactcagcttcactcgacataatctctgcctgcaggctcagtgtctgggaagcctcagcatcctctatgctgtgtgaggacagagcatctccccccaaacccacccaacatccaacacccaccccacatccaacacccccctcccatctcctccatgcagcagagcgatcattcattgcatcaaaactacacatcactcctgctgtctaaatgcttctatggcatcacctggccctaaaaataaagacagaagctcctgaatgtgctgtgtcagtggaattgggtttgattgtgagcagcagagacctagaatgatagaggcccaaataaagtataagaaacagagaaaaggcccccgtgcctgggcccagtcatcagggctgagtgtcaagaggacaatcagagaggtaggcaggagctgcatctcagggggctggtaggaggctggattgcactctgtgtgtgtgggatgaagtcataggaggattttgagcaggggagccacatgattttattgtctttaaaaaggtgtacttgtcttagtctccatattacatctgtttcaatgactattaggttaatatctcccctccccaacctctaccccaaatgaactgtccatggctgtaggaagcacagctatgtttttctcagcttctgtatgtatctgtgtatgtcctgcttctagcacattgcttggcctgtggctgatactcagtgaatatttataaaggagagaagggaggagaggaaaggtgagtctcgagccagggcaaccctttcttcactgatttccccttttgtacatgtaaattgggagcgaccccatgctctccagggctgtgtctgtcccagatttgtagcacataaaactcttccacatcgctgctgaggttgactgtatgttgagcaagaataagtaacgacgggagtcacgttgactgcaattcaaccatctaaaaagacaggggccttcagtcatgtgggtttggcaacatttgtcatcactgaggagagaggtaactagaggatgatttattgcaaccttttctggtgtgataagagccagttgcttaaagggggaaaacagatcatccatggctgcttgcttaaagagttctgtgagtatttgttcttcttttcagccatatagaaacttggaactactttcttgtgttcagcaaactttacatcttctgcagacttcaattactcagttatccgacccactggcttactctggaagggctaggtccaatggctctggttgttctaatcctgtgtacccatagacattcattttgaactggaatcttgtaactttaagaaacagcagcctcattcaatcatttctcaggatggcccattagtgggaggagctgcatccaggtccacaggatatactgacaggggatatgtatcagacgtgagagtcccatattggtattttgggtagtagatgctatagtgttggtacccagaggtattttcatgtgaacagctctgtggtaagatttggaccaagttcctggctatgtaactttaagtctaattatctagcccttctgggtagatctcctagttacctgctatgttttagcaagtttctgcttaaatttactggacagagttctgttgtttgcaactaaagccctgactcatacatggtacaggtgtgtgaagctgcctacggagtaccagagaggaagatgggaataaaagggggcacatgtacttggacttaactgggaccctggaaccaggaagctggcacacgaggtgggctatctgcaattgatcatacacatttccttttatttagtcattgagcaaatatctattgtgcacaaactatcccaggcgctgtgctaggcactgggggtaaagtactgagcaagacaaaggtcctgttctcactgagcttccattctggttggagagatagcaagagatggaaaatgaataaataaggtattttcagattgtgataagtgctttgaagaatggtttgataaaaagcgatgactgtggaaggctgctttagccagggtggtcaggggagggttctgaggaagccaaccttggggatgtggaggagccagccatgccaggtgctggggagcacgtgtcccggtgggagaagcaacagcccggagcaagaaaggtctgcatgttaaaggaacactaagggccagattgtgcagggcctctcgggcgcagtaaggagtttgggttttatttcactacagtagggggtcattggtgaaatttaagcaatggagtgacatcacgatgtgaatttgtgaaagcagagtttgagcctgtgggggtggcagggagcaggggcacctaacacgagtggagagctgctatggagtggatgtttgtcccctccaaacctcgtgctgcaatttgattcccactgttggaagtggggcctaatggggggtgtttgagtcatggtggcagatccctcatgaatagattaatgtgctcccttgtgggtgagggagttctcactctgttagttcccatgagagctggttgttaaaaagagcctggaacctccccatcttgttcttggttcctctctcgctgtgtgatctctgcacacaccagctccccttcaccttccaccatgagtggaagcagctcgaggccctgatcagatgcagatgtccaatcttgaaccttccagccatcagaatcatgagccaaatattttttctttataaattatgcagattcaggtatgcttttatagcaacacaaaacagactaaaacaggagctgtttagagacctagcacccagggtttttactggggcaggtcccatgggcaccctctgcttagcacgcaccaggattccacacacatggaatgaaagtagatgcccagcctaaaccacattgtttgcagcaaggaggctattgtaattttccgactaagagataatgagggcttggataaacgtgggggtgatagagaacagaaaagtgagtggattaagaatctactttggaggtagcgctgtcagaaaatgctgatggattgggtgtggggtgtgagagaaagtgagtgccagacttagccaaatgggcacagattatcatgggagaatccagcaccatcattaagcactttagagttcaagaaatgctgcttcatacataccctctctcacttaaccatgggcaattcacagtagaaaggatctcaggggacatctagtgtaactgtgtactttgacaggtgaggaaactgagactcagggaggggaagtatttttttcaagattaaacagagagttcattgcagacaccagcttggaatctgtgttctttgatttccaagtaagtgatctttcaatatgccatttttatgggaggattggaaatattataaacaatagaatgttaaagctggaaaggatcttgtgctggttcttaagctactgtttctcatccccaaactcaaccttttaaatttcattctataatgctgaacctgagactttacatttattcttcatcaagtttgtttcttgctgggttccatccacttgggatagcagcctgggcccaatcaggggataaaaaccacacagtgatttaaacagagaaaatgttacgtaagtaaatattaaactatgataaaagaataactgtagaatattttaaaaagtatatatggctccctaaggctaagagaatgaaccctaggaaggacaagcttggaaaagggccccttcctatggatggggtttagagcttcttgtagaaggtcatttgctgacccctggcttagcttattggtatacaggaagagcacctaacacagtcactaatattctaaagtcatcaatcccttctctccatctccactgttgccattttggtccaagccatcatcatctctcaactgactattgcagtagtctcctgactaggctcttggtttctgtcttgaccctgtattaggtcaggtttcctagaagcagagcctatgacagatggcttatgcatgtgacttattgagaagctactcctgagagaagggagtgagggtgcagaataggtcaggaaaaaaaagctaagcaaggaaggagagtaacttcagcctggtcccatggaaagcccgggagcatgaactgtaccccagaggtcccagtctgaggcagggggctggcatttgcatctccatgctagtcattggctatgggctgccctaggatgagcatgggggttgcagcttattggacaaggaagttctcatgtggcctagggcagtactctggggagggggacacctgtgagccattttcagacaccactcaaaacggctggggcaggccgggcgcggtggctcatgcctgtaatcccagcactttgggaggccgaggcaggaggatcacctgaagtcaggagttcaagaccagcctggccaacaaggtgaaaccccgtctctattaaaaattcaaaaaattagctgggcatggtggcgggtacttgtaatcccagatacttgggagtcggaggcaggagaatcacttgaacctgggaggggcggaggttgcagtgagctgagattgtgccattgcactccagcctgggcaacaagagcaagactctgtctcaaaacaaaaaaccaacatagttgcacatgctcagtaagggggatccacgcaagggtctgatagcatccacacccgctccaaccgtctattaatagacagtggtcaaggtggtcctcctcttcaagttcaggttcaggttccaagacagaatgggtcagtcttgtaatggggactgtgagatttgctgggctgctgtaggatctgccaagggacattagaagaaaggcaggaaaccacactggggttagagtcccacagaattttatttcagctctggccctttctggctgtgaggtcttgggtgagtgtcttctctctctggatgcatttcatcacctaaacatgggacacccacacctgcccaagggattagctctgggatcatcctctgaagcccaccactgctgctgctgcttcatgcattggcactaattttgaatgccttgttggatgttcacataggttaaaaagctgcttgaaatgatctgagcccagaactgaaatccattttacatagaaataatttttattttattttattttttttactgttttaaactgagttttaccacactgttcccatggtgtaaactacgggaagattgtactctgttcttttcaggatttattcaatgttgctcacctgtttgaaaaaaatcaccttaccaatggcagagcctcttgtggtgtctgagttgcccagaacagtacagctgtagtcagtccgcatctgtgacttcgttcactgtgattctgcatccaagttcaagcatctgatgacataattacacggtctaccttagtaatgccaggtgtattagtcttctcaggctgctatgaagaaacacccgagactgggtaatttataaaggaaagaggcttaactgactcacagctctgcagggctggggatgcctcaggaaacttacaatcaaggcggaaggggaagcaggcttgtcctccttcacatggtggcagcaaggagaagtgcagagtgaagtgggggaaaagccccttataaaaccatcagattatcctgagaactcatttactgtcacgagaaaagtatggaggtaaccacccccgtgattcagtgacctccccccagttcccttccatgacacgtggatattatgggagctacagttcaacgtgagatttaggtggggacacagccaaaccatatcactagggcacttacatgttgaactatgttttgttttattataaattcctttctttttctctttatatccctctggggaaattacattgtttaagaaaatgcctgtagctaggttatattttctatgaatttcatttcagttgagtaaagggaaagtgataaagtatttgtgttaaaagcctggcattgactctgacagagtcgagaatcacacatctacaaagaattagcaacatcttctctttccataggaaacccatagcctcactgagagacaccttggagctctttgttagtttgagccacattttacaaggaaggactcttttctgtcctctcccaactgctatcctttgctaggactccttaagagggagtattttccctcttaaggagtctgctggggacctgtgtaatcatttagcccacatcctgggccatgtcagctctcctggaattgtccctactagcgttgagtgtggctgtcttactcccctttgctggaggaacagacctggacttctgccaaactgaggtccctgcctggtgagtaagtaatttgtttcctccataggagatggagcgacaatcaagaaacaaacaaacacattttttttttaaaaggcataaaagcttagtcatgcaaatcaaggcagaggagagagggtaaagaaaatggccttattcatattctgcaacttcagcacgccctggcccatgggccgatttctattaaaacactcagcctagagcagccaacactccggctcattaataaaggtttgtcccaagtggagtaaacaccacccgttcccaggacacccagaagcagaaaattaaccagaggtgaactgggtcattagctgctgcacaatatgggtcatcctagattaatttagttcccttcaactggaggctcaaagagagtgaccggttctcatagcggggaacagtgacttagcagcgtgttgaggtctcttggataccaggccaggagctgccattatgattcatggcgcctctgacatcactcagtggttttgtgatgcaaagttcacatgtctgagcacacataagggactctgtgaatatgtgtgtatttgttgtgtgcatgcccgcagaatgggatacagagactcactctattcatcagggatttgttttaatcaggtatggtaagacccccagacacagaaagtactgtcatccgggaagacattcattacattctaggtcccgagaaacgggagacatggcatgctctgcggggccgcacggggaaccctgggaacccgggaaccgtgctctgcggtccgcacggggaacccgggaaccgtgctctgcagggccacatggggaacactgggaacccgggaactgtgctctgcggggccacacggggaacctaggaacccgggaacacgggaaccgtgctctgcagggccacatggggaacctggggaaccgtgctctgcagggccacacggggaacccggggaaccgtgctctgcagggccacacggggaacccggggaaccgtgctctgcagggccacacggggaacctgggaacccgggaaccgtgctctgcagggccacatggggaaccctgggaacccgggaaccgtgctttgcaggaccacatggggaacccgggaacccgggaaccgtgctctgcagggccacatggggaaccctgggaacccgggaaccgtgctctgcagggccacatggggaacgcttcctttcaagaggaagagggaggaagtgagacatgagcaagagactttattgaggaatgaatggataggcagtcaccaggctcagggttgtgagtgtgagtcacttcagcaggctctgggacataggggctgttcctagttgtctggtacctggccctggagagggagagcccaataaaagaggtggttggggcgtgtgggctcttgatttgtttttcatttgcaagacatgctccagatgagttgtttcctgtctcttaggaattggcaggcatgggaagagcacgctgtccagggtcggcaaggcctggaaatgtcagagcatcagaatactgaaaataaaagacatggtcagtactcatacatagacatgacacacacatatacacacatacgcagactcacacatgtcaacagctgaatgaaaaatgtctttcattcctggaagcaggagtcatatcactttctccaaagcatgtctttttctatgcaatggtgtgctttaggtgcaagaacactcgagaagcggcaaagataaagttaaacaaatccaagtgttataattctgcattatgcatatgttttgacttttcatcttttattcagagagtaagataaccaaatagagtaaaggaagcccagccaaccagctcagtttcatgtgggcagaaccagcaggaaattgaaaggggagagaagccccttgccaaagccgcctccacttgcactgggaagcccaccacaggccaccacctgggctgggagatttgtcagcaggcgttggcctgtgacagtcacacttcctgctcctcagtctgagatgccccaaccagatggcggaggcccgatggggaaggagcagcctccacggaggcccgcctggttttccagccttggacttgcagccgggacatgagggctccctcctactctcccacccctcctgctggtgaagcaagcccctcctactcagaagggagctttctctgccctggaagatgcttggaaacttggcttccagacgtgcaggcgccaggggcctgtccactcctcctcccccttctcctggactcactgaccttccttctgtgccacaaacagccaggttcattcccaacccagggaccctgtgtgactgaccattctcctcctggatgctgtccccagccctgtgcatggctgccccttctcacctttcagggctctgccaggtgccacctcctgggtgagcacttccctggccaccctgtccccaggagccctctccaccaaggcacttcctagcatctcaccccatttcctcttctcaagatccctcatcaccatctgaaatgaatttgagcatgtgttgacttggggaacatatctccccctccttacctgtgtgtgagctccaaggaaaatcagtgtccgacctgacttacgaacctgtgtccccagagcctacagcgatacccagcccagaggtgctggctgcacatgatgctgatgactcctagggtgagcctggcatctgagtcctgggttcaagtcctgattcagctgttcccaggcacctgactttgggagagatgcctcctctctgggtcaagtttttttcctttgtggcatgaacctatattccaatatccatcagtcacgactgctggggctcaaagaccaaggtgacatatgtcaaggtgcttggccaactcagagagttgtgcaaagagaaatgaccacgttaagttgctggcccacgcctgggtagaagtcagggaatgggctaaggaagagcatggtgatggcccgcctggcggaagtctgcagtgtgtgggtgtgtgtgtgcggatgtgtttgtgcatgcgtgttattaatgttgtttaattgccattcaggctccataaatagtagctaattcttcctatgtgccgagtatatacactcacttaattcttgcaacagccctgagtggtaggcactgctgttaccacatcatccccattctgcaaataagggaactgaggcaagggagaagaaatgacacaatctcctggaccctcttgatgccattgtggacaacaggccgcctgaactcacgtttccaggctctacttggccatttctgtgactctaatttccccagtcaaagcttaaattcatcacgctggtgtcccttgaggataaaaaagtgattaattttctgcagctcacttctctttctaggttaaatctattttggtggcgaggctggggacactgggaatatgatactgatcaatctagaatgtgtggaggagtggacagcagtttttaatcagacaagaccttcaaccccggcacagaccatcaattggcaggttctcctgggacatggacgtggtgcatggggctgcgttcacctgtggtggggacatgtcaactcgttctggggtttcagggctccacttgaacagaaccagttctcgtgacactgtaggcagaagagagcagcacatgtcacatggggctggggctgaggtcttctgaacaccctgaaggggcatctctgggtttcacctacctggatagtttctctctgttttcctagttcttagcgggcttcccttgtgggaaacaaccttcctccactatggtttttttttgttttttgttttttgtttttgagacagggtcttactctgtcacccaggctggagtgcagtggctagatcagggctcactgtagcctcgacctcccaggatcaagcgatcctcccaccccagcctccctagtaactgggattacaagtgtgcaccaccatgcccagctaatttgggtttcgccatgttacccaggctggtctcaaactcctgggctcaaacaactcacccacctctgcctcccaaagtgctgggattacaggcatgagtcactgtgcctggtgcccccttccccaactcttaatcccccaactccccagctccaagattggcaagtgacccagacccagccaatcaaacatactctgtgatggcatcaggaggtgggttcgtgagcccagcttgtctgatctgagtcagtccctggacctctgctggggaattggggaagaggcttctcttttctactgaccttgctgggctgatgggaggatcaggatctgctggggcatctttgccacctcatgagaactgtgtgacccagaagggagcccacccaggaggacgccagcctgagaaatggaagagaacccttcctgatgatgtcattttgcaccaagatccagctgtgcctgtagtcaaatactgccgggacattaagtttctggagtgaagatattcatgttttcactcatttaagtttgagtgggtattctgtcctttgtgatcaagagtgctgcctgatagaggttgcagtgagccgagatcgtgccactgcactccactccagcctggcgacagagagagtctctgtctcaaaaaaaaaaaaaaagtgctgcccgatagatgacagttccccctttttgtctcagtgacttttagagcttttggaggtctcctgttgggggccctaggctgtagggaggagattcatatttgtcctgtattcttgggaaacctttgagctaagattggactgaaatggcctcaggtgctctaatcaaattgagacctggtccaatccctgtgggcccctaaaccaaaggtgaataaggtgcctgcctagcaggaggttgtgacctccaggctgatggtggggtgagagctgggagtctggatggagcagatgtaggcagacaacaggatgagatttgaaggccacagctaagaatgacattgaagatcaagacctgtgctgtcctccatggcagtcactgggcacctggggttatttcagtttatatcaatgaaaactaaatagctttaaaaattcagttcctcagtcacgctagccacattttgagtgctccatagtcacatgtggctagcggctgctatattggacagtgcagacacagaatattttcaccatgtgcagaaagttgtactcaacaacacgagacagacatataaggttttgagtccagaaaacatcaagttggagagaggcagtagcaagaaaaaaagagcaacaataagggggactgtgaccaagaggtccccactcattcattccatccttccttcattcatctcttcacctcacattgattgagctcctatcaggcaccctctatgactgcaggctccagggaaacacaagagaattacacagatgtagcctcagaccacacagagctcacatttagtctgaggagtcagaccctaagggaggtaaataagtcactaaacaagacaattccagaaaataataaatgccaacatgaaaagagagcaggtaataggacacagcgtctttggtgggaggatcaggcctcaagtttggggagacgtgtcatctttgggcagctaaaaactacagggctcagaaaacctcagacatacagaaaggagaggaatgcactgctctatagcccactccctggaaggctgggaagccctggtccagggaaagcacagggttctaggaattgggaacgggacccaaccacaaggacaggaagtggacaggggcctccaggaagcagagaagaaacgaagcacagaagtggccatggggccatcatggagtctgtttcacggacagaaacacaaaggggctgttaggaacagccacctctggccagccccgcctgtgattgtgacctgacaactcgtggtttgtgaaggttgtttgtttcagaggcatttcgcctctctgcttttggaacctccacgagtggacttttgtcttggggctcacagtattttacccccttcagggaggtggctggttgtagtttagcaaaacagccactgacatcgctgctccttcagcctctgcagacagagctgcaagatcctcgaggcctttttaatccccagaaacaaggttcgcaggaggccagagcctttggtggtggggagcggagtcagcagggggaggggagaggcccttcggagagactgagccgccaggccatcgagggaacctgggccagggatgaggcacttcagccctcggagcagctgcgacagcagagtctgacctcccagcaaggggctctggctgcgggtttgttttctttgagcaaaatctcagaaacaaagatgcctgtgatgacctctgcacgtaggaactttccatttctgcattacgcagggcatatgtgtgtcatttaggtgttaaaacagaccaaaatgtgttctcccgcccagaagcaagcaaagccaaccccagctgcagttccctgacagtccagtgaattcagccaaaggaaatggccccacatggaggtgggtgaggcccagggaggacgactgtggtgggaaactcagcaggcggaaatgttctcttggtttctgggcgggctggaggtttcccaagggccggtgaagtttcagccctaatagctgcaggattctctcagggcaagtgacagaagacctgatgactccggtggctcagcggagagtgcattaataggcttgaccacttctgctcgatcttcaggcaagctgggtctgacccctggacactgtcccctggagcccctggcctccacgtgtccacccactgccatggtcatggctcctcagcaggaggaggcccagcagcctccaggtgcccctgcctggtgctagctgcccaccgaagctctagcctcacactctcaggttcaaatccagcgacaagagcggatcccacaaaggccacgagagtcaccctaaacggtcagcttaggtccttcgttcactgagcccatcgctgtccagggcaagtggtgctggctgggctaggtccagctcccgtgtccaccctgggacctgaggttcagggtcagctcaccctagacacatggatcgagtggggagggtgaatcctcaaatgctaatcaggttctgttgtacagaaggggaagcggaggcaggaggatgcagcaagacctgttccctcctctaacggcactcataggacagcccagccacacattcaaagaatcttgaaggaataggatggttggtatggttggtgtggaagaaggttcataaattctggatttagctttgtgggattcagctgacctgaaatttatacctgtgcaggtaggtggttgctgggtagggtgaccactactgtctctctccatcacccagggctgttttcagctcaaagccacagaagcccaggcatggtggcatctccgggggaagttgccttattccagattcacaggtccggggcgaaggggccaggcagggcaggtgtggggcggcaggatatcgccctgggcctggctccttctgcctttctgccaccatcttcagcggtgccattacctcgaggccttctgtggttgctggagctgccacgctcggcctcctgtctgcctccagatgggagaggaggaaggaggaggtgagagcaggaaagagcttacataaaagaccacattttcccagaatccccagcagctgcctgttctccccctccactgggctagagctgtgtcacacaggctgagcggccaggaagctgggcaccatccagggagtgtgtgatcgtcggggtcctgttggtaagaaaagggcatgtgggtagacatctggagtgcctgtcatggtccaattaactggctaaagggattgtgggtgtgcagctgttttcaatcaaaagtacgtaattcacatcttcccaaacacagattcctgcttttgagtaatgaaggtgaccaaaccacatgaccctgtctgcaaagattccacctggactcccagttcctccaaggaaccgtcatgtggttcaaatccaatgaaattctctaaatctccaccctcctcagggtgcagagttggctgcttctctgtgccccctgctgatcacggcaacccctgggtgcctcggcctgcgaagccccagctgtcctccgtctgcagacaagccgaggtatgaaagcctcctcgctggcccaggagcctgtcattgtcctccagcagctctagcctggatgcggtcccagagataaatcatatctctttaaaaagccacagtggcccattatttctgcttgaaaatacccctggctctctgctggtgagctggttgacaggccccggctgttgtgctcagtgctgcaaagagtcacgtcagtctgtcgacttgtgtagtgagcaagctggtagcttcagatggtatgcacatgaaatcccgtcctggcatccaggacttggctgggggttgcagagagaaccacatctgcaaaagagttggtattttacagtcccagcctcacgtccttgtgaaatgccctgttcatactgggctacaggggcgggagcaaaaatgatacaatgacaattcctgggctgtgttctgcaatattctacaacacttccacaagaaaactccaatctttaaaaatagactgagcacaattaaacaatcactatagatatttcttttcttttttttttttttgagatggagtctcactctgtcgcccaggctggagtgcagtggcgcgatctctgctcactgcaagctccgcctcccgggttcacgccattctcctgcctcagccacccgagtagctgggactacaggcgcccaccaccacgcccggctaatttttttgtatttttagtagagacggggtttcactgtgttagccaggatggtctcgatctcctgacctcatgatccacccgcctcggcctcccaaagtgctgggattacaggcgtgagccgccgcgcccggcccactatagatatttcaaccagaggaatatagtgaatcatgatctacccatcacccaggttcaacagctctcagggtttgcccccttccttccagctctttcccctctttctgccaaattattttaaagcaaatcccagacctcaagtggacattttctaacaaagttgcaatatcctaaacatctccgatgttcaaattcccccaggtgttgctcagatatttttttctggttgcttttccagaaattcaacaaggaccacacggcatttggttgttaagtttctaacttctctttggttgacagtgatcccctctccttcattttacttttaatgccactgcttgttgaattcctgggagcagttgctctgtgggatgccccacatccaggatttgtcagtctgctgcctcatggtgtcatttcaattccttctgcagatggatgccgctggacatccttgccaaggtgtgtcagtttcaattaaacccagaatggggtgttggagctcaaaggagccattgtcaagccattgcctgagcaaaggaaggtgtttttttttttttttcttcctgtcgcccaggctggagtgcagtggtatgatctcggctcactgcaacctctgcctcctgggttcaagcaattctcctgcctcagccttttgagtagctgggattacaggcatgtgccaccatgctcagctaatttttgtatttttttagtagagatggggtttcaccatgttggtcaggctggtctcaaactcctgacctcgtgatttgcctgccgtggcctcccaaagtgctgggattgcaggtgtgagccaccgtgcctggcctgtgttttaagatgatttcctggattcttgttgaactaccaaggcaggtgtttgctcccaggcttcaccatcaaattccctaacggctgtgttctgggttgagtcactttaatgagctgccctgccgttcccaggtgagatgtcaattagaatttgcaatcccaataccagggccacgttctcaccacctgaagaaaccctaacagtcgagacagaatgaatgaaggacagatcaatgggctgggtctgtacaagcacacccatagggcaacccaagggcacgttattttggtctgagttatctcctgagtcatggacatgagtctgggaaggtcaaggttcgcctgttatcgttatggaaagacactgaccttatgtgctgggctgtgccgtgggcgccttcttattacatcctcagaacagcctcaggatggctcatgattccctcaatcacagatgaggacctgaggctcaggaaagatacatttgcatcttgtaggtctgggttcagcctggacccacggtttccatgcttgccctgacccttcattccctccattccctcccagcagccagtcagtggctgtccagacatgtgcaccagctgtgctgcacctccaccataaaaactcctccaatcacttcccactgctccccatgtgaaccccaagggggctcaccctgtcccaggaggttctgcctgatccacaccccccaccccttcctgcatccctgcaacctgctctccctacgtcctcagtcctggcgtcctctctgttccctggacttgtccagcccagtcctacctccaggccttggcacctgctgtgcccttgacctggcgtgatctcctgatggccgttactgggctggaaacttctcagtgctcagcttgagctcaaagcccacctcttcagagaggctgtccccatccactgtggcctttcttccctttgctctttcaattcccagtttatttcctgtagagcagtttcaccctcttcaccaatcttgtttatttccttgtttattgtgcctcctttaccagaacgttcaccctctgagggcctgggccaggtctgtctgttcacagctctagtgctcagagaagtcactgcataaataaacaaatactttgctcagaaaattgtggatatgtaaatgaaataggtctgaataaatgaattaaatacaaagcatatgtgagtcatctttcccaagtagtcatatcataatgttaacaacaacaacaaaacaaggaatggggggagaatagaatgcctgcctgggggaagctgggctgtgtccctggacttccattccagcaggaagaagtgaaaacagactccaaggatttccaccggacagtggcatggccggacactgtttctatgtctggtcaatggagcagtgccccatgttatggctggcacggtgctgcctgccctcctgggggcatgacgaccacgtactggccctcaggacacgggaaactttggctgtttattctatttatttatttatttgtttatttatttatttttgagatagagtttcactcactcttttgcccaggctggaatgcagtggcgtgatctcagctcaccacaacctccagttcctgggttcaagtgattctcatggtgcagacttccaagtagctgggattacaggcctgcaccaccacacctggctaatttttgtgtttttagtagagatggggtttcaccatgttgcttagactggtctcaaactcctggcctcaagtgatcctcctgcctcggcctcccaaagtgctgggattacaggcatgagccaccgcgcctgccccccttgcctgtttatctcctttattattaaattccaaagagctttggatgaatctctgttttttaattctctgtctatcccagaggatgttttcaggcctgatggagtcactgagggaccctgatgagggctctgagtatccctggatgggaaggagacctcttcatccccaggcacagggaggccagcctgtgcagtattttcctctcctgcatttcaatccagctaaaggcatccttcacttcctgcttcacttcaggggtccccatctctgaagccagattcacctgaggcagcttcttccttgtgacctgacatcgcttttatgatgtttttattccagaaccacctgagagaggaaagagaactggttataaaaaggaactgcttctcttaatgactcttaaactccagagcgacctgcccaagggcagggagcagtggggcccgggggggtttctgaaagcaggggccatccatcacctggccccgcctctggctatgtgctgccttctgcagacctcatcactgctgtgctctgtggcatttaatcaatggcctttctaggggttctgagtgatgctgtctcttgtcagatgagaatccacctgcagctgcctctggaaggagtgttccaaaagaggggggtcccagcttctccctctgctgggaggggggaggtcacaggagatgctttggcccctgggcagcccttggggttcctgaaactccacaggggcagtgacaacatggaacatgctgcggaccaggctcctccaggctcagccccagaggtgggacagaagagatgcccagagctctgggcccctgtgagacccagctcccttgtccgcttacagccgtggctctgccatcacctacctggaacctggcagcctgttctcatctcccctctatccctggtcatgtcagcagccaagaggcccaggacccaagtcctccctcatccccactccaatctcccccagctctgaggcatgaggaaccccccaactcttcctgatccccttgcccccctcctactccctgagcctggggtccccttactatcctccctcccttcttttccccacagcatggctacccttgcacacgctcggtttcttgctcatttatttatctgagttctagaacgcatgctctgggcagcaagagcttttgtctgcagatttttatctcatgtaaaacaggccatggctctggagagggagaagtgccatggctggccactggagaagtggctcagggccagaggcacctgcgttgggggaacagtgaaggctgtggggacgggagaccagagctcaagtgctgcctgcctttaactttctggacaggccatgggagaggctaggcggggctccgtttccaagtgtggcgaggaagtcacttgtcaccagggttccctgcaattgagctgcccattaatgcataaggatgtcagctcctgcaagcctgtgaaataagtgccaggccagggctttgaactcctgagcagcaaggtgatttgtatgtgcagagaccactcacgaggaggcccttcaatacaagtgtccccctataatccgggtttctctccagtttcagttcctgagcaggtaagccaatttcaaaataatttttccataaggtgattatgaggcatcggtgccatggaggtgtggctgacacctctgccctggttgcatcctgcatccctgaagctctgtgctgtgactcagtgaggtaattgtctctgtacccccatcactacccagtggatgcagccaggggcatggttttctcccttagtttacaatgagattaaaggggacgttcaacactcctgactttaaagagacagatatatgcttttctttttctttttttccttttttctcttttcctgttcctccttcttccctgtctctggaaatctctacataaaagggtgctcactaaggtgctattttctttttctttttcttttttcttttcttcttctttttttttttttttgaaacagagtttcactcttgttgcccaggctagagtgtaatggtgcaaacttggctcactgcaacttccgcctcccggattcaagagagtctcctgcctcagtaaggtgctattttctaacagcaaaatgctgggaacgatcaagatggggaaatgggagaagaaagcacgatataatgattcagtagactattacacagacattcagaatagctccatgtagaccaggaagtagtatgaactcaagtgaaaactgtaaaacagcatgaaatgcattttgttaagtaagaaatagtataatgtgataagaggtacaccaatcaggaggctaagttgaggccctgctgtgcacctaacggcaaggacgtgcttgaagacaatgcttctcacacgttaatgtgctcacaaaccacctggggggtttgttaaaattgagatttctattcagtaggacctggatgggccctgaaattccgtaatttttagcaatcatctaggtgatggctgctggtttgcagaccacacttcaagaagcaagaccttaataatatattttgactttgaaccttcataataatccttaaaactgagtaaaactggttcagagaaggtcaatgacctccccagatagtggcctctcaggtaagtgacactgtcatgtgagtgacgtcctcaggtgagtgatgtccccggactcacacggcagggacatggtggagtcaggatttgaacacagatacccaattccaaagctcctagtctcaaacacattggctgtagctgcaactacatgagtgatttttctttttctgtaaagtctgtttttcatcgtctcattaattaaaaattgattataagattgtaaaaaattaatgagatgttgtcccctccaataatctctgagggggatgatgaaaatcactttttttttgagacagagtcttgctccgtcgcccaggctggagtgcagtggcgtgatctcagctcactgcaacctccgcctcctaggttcaagcgattctcctgcctcagcctcctgagtagctgggattacaggtgtttgccaccacgcccagctaatttttgtgtttttagtagagacggggtttccccacgttggtcagtctggtctggaactcctgaccttgtgatacgcccacctcggcctcccaaagtgggattacaggcgtgagccactgtgcctggcattcattttttttttttttagacggagtctcgctctgtcacctaggctggagtgcaaggtgcggtggcatgatctcggctcactgcaacctccgcctcctgggttaaagcaattctcccacctcagcctcccaagtaactgggattacaggcacccactaccacaccgggctaatttttttatttttgtagagatgggatttcaccatgttgggcaaactggtcttgaactcctgacttcaagtgatccacccgccttggcctcccaaagtgctgggattacatgtgtgaaccaccgtgcccagcctgaaaatcacttttgtatgacactgttctgaatggattgacggaagtaagtcaatgtgaaagaggctttggaaggacggcagatgccgagtgtttattgcttaagttctcactctccatggctcagcacaaaacaaaagatgttttacagtggcctaaaattgcagttgcttttgccatgaaaattcaacacagcatctttgctgtaagagtgacacagacttgaagggtctgctgttaccgtgatgaacattttcaaccaggtgagacgctgagagtgagaaatctcacctggacagtgacacaaagccctcccaagctacactctctgagtggctcctgccttttgcacccttgaacgtggccatgcacagaaaaatcccaatttgggatgcatctcccacagccgtgcttcaagtaacctggagattgcatgtcagtccatgtgtccttgtcttaatagaaattagaagagaagaaaaacaaaagccccagcctcgtgagagagtctatagggagtagggatagaataaaaggtaagttaatccattctccatttctgctcctttttaagattttttgttggtatggaaatttgtgcttagaaaaacactgcagatctgtacccaagtgatatgatcgaataaaaataatcttcaaaaaagtcatcgaatttagcagagaaaagcaaaaataccagatagtcaaaatagtaaagtcactctccaatttacaatcaggactgtatccagatatttggaacagaggaggttttctcgctgagtggtctgcaatggctaatgtttgccacctcattttgggcgtgcagatacagactttgcttcattttgggcgtgcagatacagaatttgcttcattttgggtttgcagatacagactttgcttcattttgggtgtgcagatacagactttgcattgacagatgaagctcaggttgtcttgtcacaggtggtctcttagatcatgttaacctaaaaacaggagcaatcagggatagaaagtccagccctgtgatccaggctcacgacttcttcccaggcctcactttgctcaggggttacactaaggggctgcactagatgacctctagggtctctcgtctgactctgaagtttagatgtaaagaaccaggttggctgtaagaagatgcgtattgcacacaaagagccagccagggaaggtcttggcttaataatctaccccttactatcatgcgacacgagagccagaatcagatagagagctatggttgcagggaatggaaaactcagtgcaaacaggtgtgagcaggagggagcttcatgggctccagccttcaaaaatcccagagataaacagcatcaggaatgattggatcaggctgtggctcagtttccctgaagttctcttggttctttcctctctcacgggtcatgatttcagactgtcctctctcatgggtcatgatttcagactgtcctctctcatgggtcatgatttcagactggcttttcttgtggtagcagagaaggctgcagtggttctaagagctgcatcccatccaccttgtccagagcaaaccatggaaaagccagggctcccaggcaacatcttacctttcactggcccacctgggccaggtgcccattcttgaatcagtcaaggtcagagagtgggaagagctgactgcatcaggccaatcacagcccactgctggggctgggggcagggacagggccatgggctactgtgctgggagatttggggtcaggtgaagaagggcctggtgaattgttgctgtaatccttcagtaggaacccattgcagggagaaagtcactccatcttctttggcaaaagagaaacaatcatactcctcttcttccaaccttgctgcattgtcataaggatggaaacaggtcatgagaggcaaagctttggtatgagcaaagccctgaataactgttagcaggaggggcaggcattgtagctatttctgatctcgttattaagggactaaaatttgtttactgtaaagttggttctttcaggatgatgcagtgcctactgtcaaatatctcaatcaaaaaaattaaaaattatgttactttatggtgaaatctgtattgcatgaaattgatttttaaattaaaattaattttcacgacacaagtaatatatcatgtatttccctgtaagaaaaccaagacattaaagataagctcaagtccccatttaccttccccagtctaccacccccctaaattctcagaaagggacatttgacctgagatcgcctcctctggagtgctcatcagtgaagacccagcagatccccagtcagtgcttgaattcctttaggtatgaatggagttgagttcatcctgagaaagacccctgaaggccaggctgaagtcaggtgcatggaggtccccagagaatagcagattcattctatccatgtccatgcagcagctgttgggtgtgagttggccgtggggaggcaggatgtgtcctctttgcagagtggtgggagctggcacacaccgggcactattccccgtgccctgtatctatgatctcactcagtcctcacaccaaccccatgagatacggcactattactaagctccccatgctgcagatggggaagctgaggcagagtggtcaaggcacttgctcagggggcagtgctgggacttgagcctgggcagtttagctccagggactatgttcttaaccactaggccatgtgggctcaatctgtgttaaatctggttgggaggcaagagtcccaagtgagagaactatacaccatcaacaccagtaccaacacatacatacactcatacctcccctgcccccctccccccccccccccacacacacacagacccacacaggcatgggtggctggaatactggggcaaatccatgaatgtttcacaattccatcttcagattccctgtgcatccagaattaaccttcccgtcactccgcttaaccccacctgtgagtctcaagtccccttcacagctgacaatggaaacccacagacaggactggccagacctagtggaaggggcagggccatccctctgggctcagggttccacttggtggaggctggaccgtctcttctcagcgtgtgctcacagcgggacctgctgtctctttctgaggggacacaacccccatcatatgtcccccgggccgcgatggtggggtcaggactgagcatgccccgtgcccacccccacgctcagcccgagtcaaagccttcgaggctctccagtgtcatctgcacaggacccaggtgccatcgcccccaggactctcagaaactcagggcggtccccgagcagctcacatctcctggggctgagcatccgcagatgctgtaggaaggaggcgactgggtgaggggaaggatcgggaagcagagtttggccaaggctttgtcggagccactggtcccacgcgcacggagctctaagcagttcctgcctctctgagacggggacgggacaggccccccatcaacctctcgctctctgggcttcggttataaatcaccccacaggggtagaaaccacccagaaagccgggagctgctccaggagcttacgactggggtgggctaatctgcagagtggtcaaccatgtgctcatggccctggagtccctgtgaccagccctggagacgtcacctcagagggagggcgctttgcccgcttccttcaccgttggggccgggacctgaaacttgggcacagagtaaatctcagtaggtatctgttgagtgattcggagcccacctgtcccacatacaccacgaggaggcctccagggtgtccacaaaggaggcggctgggctggggaagaaatgcaagaattcctgcctggacaggtttcatctacatagaaagaggagattcactcccgaaagctatttgtcagggtctaccctagccacaatgatgcctgacagcctggaggtgtgaccagatttgctggggggagacggacatggttttgacaggggcagggccaaagtggggcagggccaaacaaggcaggggccagggtcatgcaggggcgtagccaggatgggggtgtggccagaatgaaggcggggccactgtggagaggggccatggtgggggctgaaccttgctgcaggttgtagaagcgctgagcccatataaaggatctgctagcccttgaccttccccaggtgtctcatattcccatcactgatggttcattctcccatctcccattgcgctggctgcttttcattgaagttgtgacaactgtcatactaactcattcctttggaaaaggctactgaaaaggtgccaccctggagatgctactcaggagaataaccctgctggtgactgctttcaccttctgcccctgaaagggcttgactgtggggggtctgagctaccctacaaacatcgtcatatccgagggaacgcaacattgagtagcaaataataaacaccatgacaggtcaagagacagactgcagaaagaaagcaaaagctttcttattttagtacctataatgacattttgttcttgcttttgagcatgtggcctacattttcattttgcacaggctgtgaaaattatgtacttggatctgctgggagaatgtaataaatctactaagagtcaccctcatcctctctgtcccgctctcctgtgtctctcagagtcagcagagggccttgtcagagcacagtcctcccgcagtcttcctcatctctgtaaatcgcagccccaccctcccagctctcaggccaacacctgggagtcatcctccactcttccctgccttccacactccgcttctcatccatcagcaagtcctggcagctctacctgcaagggatctgcagtattggactccctcacctcctccactttgaccacatggctccggtcaccatcacctccacctggcctccctgttggtcttgctgctccagctgttgccccacacccccaacctgtcctcagacacagaatcccattaaaaagtaaaccagaccacatcctgtctctgctcaaaccctccaatggctcccacttccctcagagtaaaagctgaagtcttcacagggtcgcctaaggcctgagatgacccatctctctctctgccccactgtgactcatcacccctctggcctcatcttctaacaccccttggccccagccacacggggctcctggctgctcctcagcctcatccctcccctcgtgtctctggactctgtcctcgctatcccctctcctgcatcgctctgcccccaggccccaggcagctcccacacctccttccagggcccagaatttacaccagatacacagttttctgcacatttgaacgaatgaacaaaagaaggaatgagcacatgcttcctcagcggggaatactgctcccaagagggccagagctggttcctggaggtgaaaagatttttctctcattatgtaaaaatacagatgtaggcacagtgcataaaccattttgcggtatttctgtagtattaaattcatggtgggggtgagtaagaaaaaaacctctatgaaggttccttaggggttgatcatgaattaaaggtgagaaaggctgaattagaggacagtccgctgaaatcacaggcttctctcccacacattgccagggcattggggaggctgtggaagacaaatcaagatccgtgcaagtgcctgaaagagtcacagccattcttcctggcgtttaatagaaggaatgcctcggtgctttggggaaacctttttttatttcctgccaagggacagaattacaaaggatgatatttgcattttcctgaagcctctaattttcccattcatcacttgtcagaacctgaggcccttcctcagcttatggaatgtttgcaaacacgtaatgatcccttttaccaaagaacgtcacaggctccacatggaaatgtgtttgtgttgcagaggctgctaatttaatgcattaatgtcactctgcaccatggcggggtctcagggcatctcatgtcaccgtgagcgagctggtctaagacacaggaaccatggaaaccatcccatgcctggttagtgagtagatgcgcagtggggcgccgttcactgccttgagggtgaatgtggactccaggagcgagggccaggccttctagagctccacccaccctgagatcacaggcctggctcaggcttgctggacttgcccaatggggaactttcaggggacagtttaaccatcctgaggggcagacagaccagggagaggccaaaggcacccgtggggttcccccaggaccgccatgaatccccttctcctccctctctccatcagtgcctctgtccttcccacctgcccagcccaggtgccaaacaccggcctcatccgaaaagtccaactgggcccaggacagtgattcccagacccagctgatcccgcagggagctttgggtcctgctggtccctgggttctggtgacaaaaggacatgcaggaaggcaaagtcccctctggatttttcatcatgagccaccctaggtgctgcgcaccgccaggctgcctgattccaccaagagaatctcaggaaatgaaaaataagattttagttgttaaatttcaggcgtcggggctctttgagagattgaaaacacctggaggttgggtgcacaatggagatggggctgtggggacgtttcctattcccagtggaatccgtgattatttaccgagcagcctggagaagcccagtcttcacggaatggaaaagctgagccgggttttcatgcacaaaccggaagccgggtggcgccctcacagcagagctcctgaccttcctgcctcgcacgtcctggcagcgggagggcggctgccttggacacagtttattgtgtggcgaggagggagacaggagagtacggggcaaaaaaaccccaacaaatggctacgccttaaaaacttactttcaaatgcccagttcacgcagttttctggcattttaccaaatcaggcaggttttttttttggcttttcccaccgtgtgactcggtctgccttgccctgccccacccctgcttgggcaatcgtgccccccgctgagctcagcagcctggcgtgaggtgaggtgtctgtgtggctgctgttagcaaatccaccattccgggggcttccctggatggtgatgtggctgttccccaacttgctcctggcccagtgacccgtggtggctgtaggagccgctgcagggttcgggcagcagtagtgaagggctttgctgctctctgcagtttcgatgtcgccctcattgtccatttcctcagcctaaggagacccggtggcctgatggacttggcttcgttccttctttcagctcagggggacgtgcatttttcctcctttgagtcgaattagcaatgaacttcccctccccagatggacagcgtggcatcgtcagggcccagctgcagctttccgggccaacgggtcttcgtgcattgtctgatttggttctgacaagcatgcgaggccgtgcggtggtcattatacccactttacagatgagaaaacacaaggtaaggaactcgcccgaggtcacagggatggctggatgtaaaacagactcctgcgtgtacagatatagagattgataagaagagaatttcaaatctcagccaaagcgaaggtcaagtcaatgctcttggggacgttcccttcactccccagaacgttccaacatggccagtgaagacactgtgtccccgtaaccctgggggagaagaggacggggttaatgaaaagtagaaagtttcctctttcccactgttggagatgccggcgtccccacatcaccgtcggcgctgcatctggtccacttctgggacccatttgggtccctgggccggggcttcctgtggatgagccgggatcacacagcgatgtggggttgctcagggcgccccgttcactccagagtgacccctgacccaaagccagtgctgggtgtttgcggaaactgaaaccagggcaggtctgagtcagaccctgcagaacaatgaggccttttgtgcaaatgaggcgggggaggggccgggggagaccaggagcttcctgacggggtccgcagcacaggtcacagcgagtgaattcaggaggtgaccctcgaaggtcaggtcacagccgagcagcacaggcgctgagctaagtgtccacaaaggagacgaacaaagcggctgctgtgggaacagagtcagtgtcggtcaatgctgagtccaggagctcgggcctgccggtcggcgacgggggcttcatgctggctcccccaacagtcaggagggccatgtgctgaggagggagggtcctcagcgtccccaggattgctggtgggttcacctagtggaatcgcaggggtgaatccactagttgagatatttttctccaatggatattgaagtgaataaataactattgatataaaaatatacttcccatatttacttgtaagtaaattcatcagaccccaaaatacccatgacttcacgagccagaggtttgcttctatcccatgtgacagccccggcgtgggggccccctggctggttgggcagctcccggggctgagcctcgacactccagtcctgtgatctgtcattgacaaaggctgtttttgtctacctggtccgaggaggtgcaagtcacatcagacaggagggaagaggagaagggcaagtggagcgtacccattcatttaagggtacactgggaaggtacacaccagctgcaaggcagaatgggaaattcagctttggtccgggcagctaaactttgggatttccaatgtgaaatgtaggggatgaggggtatcaagggtcagcccgcagcctctgccccctctatgtgctcctggaagtcatctactctcctaccaggggatcccaccagggcatcccacattttgtgaaaattagctgattaggagagcatcctttctgcactactgtggagggggtgggggcttaggcatgagcagttccctaagtcatggtacagggcctcccccatcttgggagagcaaaggctgtctactgtgtccaccaaccctgaggcacacccacacagctttcctgctgcctgtgctgagccaggcactgtgcttgagatgtgcacggtatttgacatagagtcggggtgggtggtgcccagactcccaagtcactccacggtgagacagattcacagggctccaaggacaagtcaaaataatttggccgagcctctttgttttagaggttggtcaactggtgtcaaaagctggagaaggacttgttcaaagtcacagagccaagagccacctgggtccctggtgtctttccagtgaacaccaccgtgacctcactggtcctgaatggtccctttttaaataaagagatacatggtcatcaaatgcaacaccactgaatctgtctgttccctgcccacctcttctcagagacatccacaagtaatcctctagctgtttccgcacattatttccgaatcctgaaagaggaagcttggccaggtgctgaggctcatgcctgtaatcccagcactctggcaggctgaggcgggtggattgtttgattccaggagttcaagaccagcctgggcaacatagcaaaaccctgtctctactaaaaagacaaaacattagtcagacgtggtggtgtgtgcctgcagtcccagctacttgggaggctgaggtgggagaatcacctgagcccaggaggtcaaggctacagtgagccaagatcgcaccactgcactccagcctgggaaaccagagtgagacctgtctcaaagaaaaaaagaaaagaaacgaaagaggaagccagggaagctattcatagagctttcaaggtctagtgttatctaatgtctgctaagctagatgagaagttagctcttacaccacccaccagctcccttcctgccacgctgtatgatacatcactatttttaattgcatcataatcagcctttatgtcatgtgaccaggtaaatgctattctctgcagagcgaagtactataatattttctttcttacacacctttcatttttcctagagttcgtaattttcttgtttttttttttttttttttttttttgagatggagtctcgctgtcgccaggctggagtgcagtggcatgatcttggctcactgcaacttctgcctcccaggttcaagcaattctcctgcctcagcctcccgagtagctgggattacagacgtgatgctggctaatttttgtatttttagtacagacggggtttcatcatgttggccacgatggtctcgatctcctgacctcgtgatccgcccacctcagcctcccaaagtgttggtattacaggcatgagccaccgtgcctggccttcttgttctttttatttgcaaagtttacttacagatacttaattatttctcaatcctccgtcagtgaagccactccagtgtttttcaagctgttttgatcacaacccatcataagaaattattttacaatggaacctggtacatacacacacacacacacacacacacacacacacagagacacacaccccccatatatatgaatataaagtttcacaaaataatactgataccttttgatattttctactcaactctgtgattaatgttttaaaatgctagttgcacccgctgaactgacgttagtttgaggagctctaggccagtcccacgaggtcctgctctgtgcactctcctgaaactgaccagctcccatctggactcttctctctgctgctctcctgaggtgatcagttttttttgtttgttttgtttttgagacgaagtctcactccgtcacctaagctggagtgcactggcgcgatctcagctcactgcaacctccgcctcccaggttcaagcaattctcctgtctcagcctctggagtagctgggactacaggaaactgccaccatgcccggctaacttttttttcatgtgtttagtagagacaggatttcaccttgttggtcaggctggtctcgaactgctgacctcaggtgatctacctgcctcggcctcccaaagtgctgggattacaggcgtgagccaccctgatcagctttttgatagatctcatgtcttctctaattaattttctgctttttatgagtcactggcaaattacttttttattgacagaaacaaaatcgtaactctccagcattttatgttttcttaccattcctccaataacagaaaatactaatgagaaggagaatattacaatgaaaggaagcaggagagcaaataagagattcgacctacacatggttttgattctgcgtgaggccggtcatacccagatgaaaagctagacatccagctacgtacatccctggagatacccagacgatggaatggaatgttcactgtggctctaagtcagagcatctcatttaagctttatggacagtctgcgcaggatgtgtctgtgtggggacttctcctgtgcatcatgggaggtttagcagcatccttggcctcactcgccagatgccaatagcatccccctctcctagttgtgacaattgcaaacatatccagacattgccaaatgtcctctggggggcaaagttgccacagctgggagccactgctctgcaggtttggacgctgtgcctgcaattccatgcagcatcacgggctattgatcatgtgtcagacggagcttaaattggtcgatcgcatcctcaagtagccactccagagcgtgattatctgacacctgtaatttaccatcctggttacatggggggcaaacgtggaattatgcacatcagcgggcccagggcctgttttccatggacttagtgttcctgctgagcatggcctcggtctccccgagttgttaaagacattgacgcctcagaactgactctgcctccacttaatcagctcaccagaaaattacaataaaaatcatctgccacttatgaaattgccgttaaaatggactatttcctgccacctggggacaggctgctgtttctctttcagcatcggtatctgagatgctgtctctgggaaacagcgatcatagatgctgttgagacactccattggccacggtgtgtccctggattgaaaccaaagtcacaacaatgagtctgaaacgtaccgaggaatcggttccaaacatggcaagagcaatttcaaacagtgctgcgagggccctttggggtcaggacaggcactgatcagctgagggcacaggccctgtgccgccacggctcctccaagccagcactgctcactccgtccgtgaaatcccagccaggaaggccaatgtatctgtgccagtgcctgaaatgtcaatatcacaaagccagcaggaggggtgacccggtggagctcagcaaagatgacataaaacaggccacaaagctggtttgccagggtgcaggaggatttgtctgttttctcctgagaatggctgctcagctcactccacacagcatttccatgcttcatctgttagccctggaacgggtgccctgggagccacggaccttggcaagctccactgtaggggaacctcatgctgacagctcactcttgtggattaatcctgactgtttgctgtatctggagccacccccaagaacctgatcatacagcacacaggaggggctgtgagcggagatgaaatctgggcattgtcttggttgttattaatttaattgtcattctgtctgagcagtttcattttcggagagtgatttgatcgcccttttagaaccttgatcatctcagtgtcatgttcttagagggaggcatccctggaagaggtgcccactgtggtgttcttttaattaaattcatctgttcctgcaataatgtggatgaaacacctgccctgcaagcaaaatacatacttgctcctattcccgggacccatagtggggtggagctgaccacagtgtgtgcgttagacgccactcttcaggcaggttcactcctgagtctgcactccggggacttccgctgtttcccatcgttgtgctcacacccacgcggttagcaagtgtgcatcgggagacggatttcgcaggtgctgagctgctgggtgggtgagccgggagctggtggagagaacgcaaaggccggatgtcgtttggttcttatctggaagatttgaggttgcaagaagagaactttccttctctgcagtcaggcagagctcaaggcaggtcctcagccttgtaaggtcagcttttcagccctgtctgcccacttctgctcatggaagtcatgttaggatgcctgtttgtgtccacggatgaagggcttcccctgccccccagcctcatgagtggcagctgacgctttcccgtccctgggtgaacctcacttccatttctcacagtgctgaaccaggagcagggggaacctgtgatccatgatctcccacaaatcccaacagacatgttctatagtttaaagtggttatacgagttcttatttttggatattatttgtatgtgatcaatttacatggtgcttattgggtgtttgtgttttttataatgtcggtttgtgggatctgggagaagaagggtttttatgaggaagatccttggggagacagaaaccttgatgcggggagctgtgagcgctccactcagggcagggagcacattcaggacgggctgggcagagcctcggaggctcctggctgcccctctccgagtgtggggcctgtggggcgactccattcaggaaggatctgtctacttgatgcaggaacaagcccagtaaagcctgcactgcagctgaaggaacgatctgtttgttctctaagaggcccctgcaggcaggagatgtcttaaataaccacccgcaggcagagagtaaaggactcagtgaagaaagaaactggagctcagtcctttgagggcagaaacgcatcccccacacccgtcgtgagctgagcacggccacgcctgggctttgtgggagcctggccaggcccagctcctgccctttgctgaacagggagtaaggagaagttagatagctgcagggacgtccttggcctgactggtctagccacctcactagcacgtggggcagatgaagctcagggaagccaagggacttttcccggatccccagggaataggacctgaggtcccagctcctgactcccaagtcagtgctctctctatggcccaaggttgctcagtacctgccaggcctgcgcagagcactttagaatcattagcccaattaaccctgactgccacaaacacatgaggttgggattgtacccattctacagatgagaaactgaggctcagagaggcaggtaggaggaggaatgagacccaaacctagcactgtgatttcaaggagcccttaacttctatatgctcatcagataaatattctaccctgtgacaattagtattttctcagattcaaaaaaaagcaaaagaaatgttaattcttggggacatggttctctaattagacattcaaagaaattcccagaactttgtgggttagcagtgatgttaagttactattggcttctgcccctcctacccggccctgccctaagcatttttctggtgtttagttgttgaaacatcatcacaaatttgtatgatatgttttgatgtgacatcattgcccctgtgttaagggtgtggaaactaggcagggagagcagaaattgcttgctctaaaacctgaacccatgattccatttccttggatatatgcctgggttggggatttggaaacctgtgggaggctgtgttattgagggtcattgttctcattctccatcttccttccctggatccgtgtcctctgtccgtgactctgtagtttgtgcatctagaggcagagtctgtttccttgtcctgttgatgttggctttggttgtgtgacttgcattggccaatgggacgtcagcaggtgtgacgtgggcaaagaggtggcatgtgctagcacagctggtcttgcctgcttgttctcctgccttccatcatgagataaataggcctctggttgtccctgtccaaggaagataggagaccctcagtacagcagacctggacccaactttcagcttgcagccaagaaaagccagtcctggctcagatgtgatgaaccccatcagacctgtggacatgagaatgagaaataagtactatcgtttgtaactgagtttgggggtggtttgttacacagtgtgactgtgagagtagctgactgatacaaaactagagacccaacatgctgcagcactcactagcacccgaatgcacctgccgtcagggccatcttctccggacacaccatgctttccattgcccccagggcatcttcatgtcagatgatgggtccttgcccaccgcatcatgttggcccctgtttccaaggggcaggacaagctcttctggtctagttcagtggagcactaactctgtgcatcaggggagcttttgcttgtttgttttgttttgctctaatcagacgtgcaaggacctattgagttcttctaatgcagagaaagcctgtttggctatcattatgtcagtttctttttgacttttgcaaactttctttcactaaacattcgtcaaacctacagctggcctttctatggtgacaacaaaataacaggagtgtttgtgtcctctttggatcacgctgacatttctatccaccctgacatctttgctggagagaatccaactgtgccccctcctgacaactgttcctgttgggaagtttcttactaaataaccatcagcatcattatcattgtgcgtcttttggacaggaagaagggagggcaaagttctgtcccagcctattaggagtcaagagggaagcagacgggagcggctgacctctgacggcttccccagggggctctggctgggctgctcagctgtgttgtctcacagcatatgcttcacagctccctaggacctcagtatcattcttaccataggacagaagaggacagcaaagctcagagaggctgtgtcactagctttaagatttagtttcaaccttagagttaggctttccctcttcctgattataaactgaaattataataacagcgagtcaaggctttctaaactaagcatattcacaggaatattgattataataaccaaaagcaaaacaagaaaaaaaataaaaattgtattgtccagaaatagaagattggtgaaggcagttatcgtatatctatatgaaatacattgtaactaatgaaatttatgtttttgaaggctgcttgatggcctgaagaaatgaacatggtataatgtgaagaaaactcaaggcagaatctgatgagtaaattaacaaaacttccaaactaactaaattaaacatttagaataaatcctaattttataaaccaagtagattttatatgtgcattaaaaacactggagttagattttattttttctctatttctaggaatattttataaacttttcaattactttttaaaatcagaaaataagtgaacattcttaagagtaaaaatataataaaagcatagagcagccttgaggtgtgacgggtaactgtcttatcatctgggacattttttcatttcacaaatgctcccttcttctttgggatgcctcagggcagggaccctgtctcctctctgtcttggtggcaccaggaacaaacatggcccaataaataattgataacaacaattgatagcgccttgaaaggagtccgttcacttcaggtggctcactaactcctcaaggctttctcttaagtgcatttcatttgtttgattttttttttcaacttaaatggatgaaaattaaagccaggagagagctgttggctcgcggacagccagaaagagaaaaataaatgagtgcagtccctgaagggccacagggtgggggctggacctgagcacctgccgtgtctgaaagtccattttttgcccagttgttctctaaggcactatgatctaaaagtcaaaaaagaaaatggatgatgtatggaacaacattcaacattgttactacaacataagaaagttggatttagagatcagagagaacggtccctgcatcagagtcacttgctaacaggtgtgtactgagtacccacccctgccaggcactgctctgggtgctgggacagggcagggaacaaaacaacgccccctgcccaccacccactgcgaggttactttcgagtctggaggacaagcagtagccattgaaccggcaactgcatgatgtgcgggaggtgggggctgttctaaaggacgatagaggtgaagggcaaggccgtgtcaggggtcaggaggcctctctgaggaggtgggcgagccctgggaagagcatcccaagcagaggcacagcaggtgcacaggccccggggcaggagagaccttggtgatcctgggtgaggaacagcaggggggcgggtgtggctggagccatgtgacccagggggaggtgagaggagatgaggtcacaagagagggcgtggagtgaagcggtgaggggtgacctgtggcctgtggtcactgtctccaggtgagcaggtcccagtggagagccagggctctcaggggtcgttctagggggaggagcatcagcaccccggggccctgctgggaaagccagctttcaggctctgctgagacctcctgaattggaaccttagggtgggcctcgccatcggagttttaacaaggcctccagaagattctgacactcaccagagtctgagagacacagcagagctagaacccgggctccagttttcacccaggagacaggaggattctggctggaagggcaggagggactggggtcccccccagaaggagcgccccaggacgatgccacacaaggtggacattcgctcctcctgggaatgttctctaagggttgcttggacaggaaagtggctctctgagctgcctggcattggagatgctggggtgagtgccccaggagcaggcctgcactggtgactgacaggcaggaaataaacaccccagcttcccctgtgtctgggtgactctgaggggcgtcccgtacacagatcccaggctgctcagcaggatcgagttgggaagggggttccaggacaggaagcagcatgactagaggtggaagaaccttggcatatgcagggcactgtgtgtaattccatcgggctgcagtgtaagcttgcagagaggaggagggagagtggagtgagatggaaagtgactgatgaaatgtatgtctccccaggaacgtcggtcacggataagcccccagtgaagggacttaggaagcctctcccccttcgtgttctttccccagagagtcttcagagactggaaatgcttgccagggaggaagaaccactttctgtcctccatcctcaggagcacagaagggtgaagctgagcccacatagagaagcatctcatgctgtctgcagcggctgcagcgctctcctggggcaggagatgctcaaaggtcaacatgactttgaaaaggggctgggagaaaagcccccagtgctggctctggactcactatcccagggctcttaaagggctaaacatgactagattgtagtgagcctttcctaacatgcaaagaagcatccagggataatgtctaaatacagatgtgctatttctctcctccttctttttcaacttttccgtcaccctcagtgtcctcacagcagcttccccttgtcctgtgacaaacctggagcaaggtgctttgggtgggaggcagagtaacatgggagaccctgagttctgcatgtctctgcctgtatttccctccttccttctagttcatggaggtaaacaggtgtggcgactcctcctggcagggactttcacaggacagaggcagaagctacttgagaaagatttagctcatcagagcgaggggcggggtggagagggaaagagatggaggagaagattactgaagaatggaaaggtgcaatgtcccccaggtcctagggatgtgctggaatgcagagggtggctgtgaggtcccacacctgtaagcgggagtcactggattccacaggtggctgacctgctgaccagagatgtgagcccagtttcctcttctgtaaaatcaggcgtagcccggtggctttcaaccctggctgtatgttagtgacacctgggaagttttaaagatttctgacgcccacatcggactccagatctatcagatcagaacatctgggtttagtatctttagtgtccctcaggtgactcaaatatgcagccaagatggagagcactaacctaagctaagtcctgtttatgagaatttagagaccaagaaacacttagagcaggtaggatcctaagaaatcacctgatgcaactcctaccattcgcaggggaagaaactggttttcagagaggccaaatcattcacccaaggacacagagcatgctagtggcagagccatttccaatattccctctgcctcttgacctccctagaagacccacttgaagctctcaacttcacagtagagctgggtctgagaggcccacatgggatccctgattccaggaaggaagcccaggcctcctggcagctcagtgagtcacactgcagcagtggccctgaggcccctccttgaagaaaaattccaggaggcttgaaatgctctccaagatatagaaaaggaagatgtgcctggaaactggagaagattgcacagtggatataaatatttgggttttgtggcttcttttccccgcaaaaaataaacatggcagaattgcttctcactgaaagggcgtctgggtttcataaacagaccataaagaggcacctggagacccagaacatccccaaatcagcatctgtccctgccttctggctgtacctccatcctcctcggtctctctctctcacccaggctcacaatacaaggaagcactcttgccttttggaaaaaggacggccttctccccaccacttgtctcttggctcctcccacaggtggagggtgaatctgattggtgggaagataagactctgggctcctccagtgggcggggctaatatgcaaatggtcaaaagagttaggatgcttttggcggcaactaacagaaaatgcagctaaaagtggcttattttcttgctacgtaaaatgggttccatgaaccagcaatatcagttcattagaaatgcagaatctcaggtaatacccaacacttactgaatcagaatctgcttttctctttttaacaagatgacccaggtgattcatatgcatattaaattttttaattacttagagtcaagtttattttgcttaagctttctacctggctgaatatctaattacatattaattccaaatcttccccaacgcccctgctacgttttcctgtttgaaaaaaaaatcacaataccagaaggaattgatttctgatatgtaatatacattatttaaccgccttcgtgcagttcaggaaatgggttccccacattaattcatggagccacaaaaaatttagtgaaatttggctaaataattttagattcacacgtgattgtaagaaataggaaaaatctcacatgcacttcactcatttccccccaataataccatcttcctaattatagtaaagtttcacaaccaaaatattgactctgatacaatccatctatctgacccgggtttcaccagttttatatgcactaattagtgtgtatttagttctttgaaagtttattacatgtttagattcatgtgaccaccaccattaagattgaaaacagttccttcctaagcattcctcacgctgtccttttatagcttgttccatgaagagcaggtctatgtaaacctttccccaaaggcccagcaagctgagaggctgaagaaagaagctgacaaatccagcttctatgaaagaaacatttagtagggacctactaaagcgatatttcaggtggctgccagactgtggatccctacacccactctccagaaaatatcctttagataggaagcttctgtttttgtaaaatacgtgcaactactcacacctcagattgtgacacttgtgaccgctaaggaggttagataaacatatttatgaggggttatctatgctataggcattgtttctttttctttttattatactttaagttctaggttcatgtgcacaacgtgcaggtttgttacatatgtatacatgtgccatgttggtgggctgcacctgttaactcatcatttacattaggtatatctcccaatgctatccctcccccctccccccaccccatgacaggccccggtgtgtgatgttccccaccctgtgtccaagtgttctcattgttcaattccctttatgagaggttatctacactatgagagcaccttagtatgcaagagtcaaacactggtcatcatggcggttttgcttcaagatggtgtcactcttgccacacaaaaggttgttttcctacatagctatactcttctccttccttcctctactcctaatgcttggaaaccactattccgctctccattttgataattttgtcatttaaagaatgctgtagtggctgggtgcggtggctcacgcctgtaatcccagcactttgggaggccgaggtgggcggatcgcttgaggtcaggagttcaagaccagcctggccaacatggcgaaaccccgtctctactaaaaatacaaatattagccaggtgtgatggcgggtgcctgtgatcccagctacttgggaggctgaggcaggagaatcgccttaacccgggaggtggaggttgcagtgagccgagattgcaccactgtactccaacctgggctatagagcaagtctcggcctcaaaaaaaaaaaaaaaaaatctaagtgaggtcatatagtgcataaccttttgagattggtttttttcactgagcttaattcccaggcgattcatccatgccatcacaggtattaatagcttggtccctttcatggctgaatagtatttcatagtagagatgcaccagtttgtttaactcattcatcgaaggacatttgggttgttttccagtttttcactattatcagcaaagttgctatgattattcgtatataaatttttatctgaatacaagttttcatttctctgggacaaatgcccaagagtgcaaatgccgggttatgtggtaagcgcatgtctaatttttggaagaaactgctgaactgttttccagagcatctgtgtatcagcaatgtattgtatgagcaatccaatttttctatacccttgtcatcatttactgttaccactattttttattttagccactttcatgtgggtatttagtgattttaatttgcattttccttatggataatgatgttgaacatctttttgtgtacttacttgccattcatatatcaccactggtgaaatagctgttcatgtcttttgctcatttcctaaatggatttttttttttactgttgagttttaataattctttatattattctaggtattaaatcctttgtagcataagtggtttgaaaatattttctcctagtacatagcttgtcttttcatcctcttcacaaggcctttcgcagagcaaaagtttcaaattttattgaggtccagttgatcaatttttccttttgcgcattgtgttttctgtgtcaagtctaagaactcttcttctagccctgggtcctgaagattttctcctaagtatttttttaaaaagttttatagttttacgtgttacattatgagtccaaaatccatttttgagttaatttttgtatcatgtgtgacagggtgtgattaattttttgtctatgtatgcccaattttttttctgacactatttgttgaaaaggctattgaatattaaagttctagaagcacaggcttaaattacaaaggcatttttttttttactcacttaacaagacgtccagaaaaggcaactccaatttggcttactctgtagctctaggaagtctctgtctgcatctctgggattctctggtcttcgccttggggtttccggtggttgttgtggctccagcatcaccagcctgtgtccagaacagaggaagggaaggagagctgggagatttttctcctgtgtggcttgggaaggctttcccggaagcctctagtagatgtctcttaggtcccattagctattaatagaactggatgacaggcctactcgcaaaccaatcacaagcaaaggggagaggattactgtgattggctttgaaccactgaccaatcactttgctctgcttagggctgaggcagggccaccttccttcagcacattgttttctactggaggggtgaacaaaagtgtggctctgttaccaaggaagaaaggaaagtggttgctcagtgtctgctgtgaacctggctgtccctatgtgtcctctctcctctgtgtatgtgtgtgtgtgtgtgtgtgtgtgtgtgtcttgcaaacatcagtgcacaacacaccacagtcccataattcagtggagtgtgtatctgctcggcagactccactgtccccacagtcagggtccaggcactagaaggtatgtggcaggaaggtagaggaagacccaagccacagacccccatccaacttcgagtgcaagcaatggaaaccgactctggattccttgatttaattttttgaagacatttataggaagaaatgggttaagtctgtaggaaaattaaatatgaagagccagattcacggggcttggggacatcagggcagctcctgggtcctctgtgtggccatcatggtgaatccactcatgtgtcactgttcaccattcaggtccccacaggaggacaggatggtcctgtcttggccacatgttaccccctggactcagggacagtgttgtcatttgactgaaagtccctcctcaccacaaggacagggatggggagtttctcagcggaagcccaaggatttgcttaggcctggagagcaaaccccacacgccctccacacatcacctgcacagacgcccctccagctgagccagcctgctcactacccctcagacagtcttccctcccatccttgcttgtgctgggacccctcctggaaggctcccctctcctgcctgctcttctaactttcatgatccttcaagactctagttaagccaccctcctcctccaacaagcaccagccattgctgctgctgtgtcgaggtttctgaacctcagcattattgacattttgggctgggcagtctctgttgtgggactgtcctgcacattgtacaggatgcttacagcatctctggcctctacccagtaaatgccagttacacctttacctagtcgtgacaaccaaaactgtgtccagacattagcaagtgttccccggaggggacaactgcccctggttgagagccactccttttctgaacctgagtcactaagatttactgccatagcaacttaattacattgtgatgtttacttaacttctcactgctgcttattactttggcagactgcagccagccagagaacagccaggttaacccatacggtggccccacactaagttgtctcccacaccgtgtagggatggctcagtgcacagggagcatggtggggtttgggcttgatggctttgaagcctctgctagactgggaggcacacagtttggtaccatgtctggatgcaacgtcatgttcctgaggcaggatggtgcttgtgtaccgaagacagtcttgctggctgcggtgaaggacagagctctcggtggatccagtgggaaccaaagcctgctgtaaccctccaatagtaacagccatccgctcaacctctgggcccaggcacgcctcacaggagctctctacgggcactgtctcatccataatgaattaggtatcagtgtctggtttttagagattcggaaactgaggccagagcattctaatgtcctaagcacattcatggtgagtaggagcagagctggcttccacctgcagggtctgagtctagggtcagtgctcatagccacgattctcgtaggctacccaggcccactgtctccttgagcacccatgtgccccatgcagcatgtaacttgtaggaaatgaaggcgtttgccagcctttgcctgtgtccagtgtgaactcatctcctatttagcacaaagttattacattagagttactgatttagtggatacatcactttactctgtcatcttgacagcgataagatctgcattttgctcacttctggatcacgcaatctagcagaattcttcatgcatggcaggaactcatcattatttgcctcatttaattgaattgtattatggttctgtggacacttcatcacacctaacagtgttttgcacaaagcaattgttaaaaaatacttttcaaagggctaaatgtttgatcaatcaataggtttttaattgagcatccttacaagttaatatcataaagtgatgataaaagtgtttttattactgtgtgttggttacccggattaaatgtttcttgaagcctcagagtgcatgatgattcagttcttctgattttaagctcggatctattcagtgacgagatatgcaggtctggaagcctctgaaatttataatgtggatgctgagaacccatgatgctggtggccaattttgaaaattgttacagaaatttatattcattagacatgatggcaagttctggaatggtattctgcagagtcaatttaaagaaatttgtttcaaggagataactgaggaagcagcaagcagagacactaacttggatgtgacaccgctgagagacaaaactcagcttgatgaatgcagccaagccaggaaagggctgtggacctgtcccagaggggccacctattttctgacaattggcaatgttatctattaactagaaatctgttatgggacaaggagaagattgcctgcagctctcggagaataagacagttgtcctcttggcttctatataatatgtctctaagcaatgttttaggatttatcagcggtgagatccttggatatttaaccaagtccccctgagggctataacatggtagtgatgggaaatagagctgggggcaggggaagaaaagctgggatgtagctgttacccctaagcacattctcctgaagtgatatctttgcaataatctgtttcaataatatgttgacatgggcagtattaagacaataatcagaagaatttagaggaagcattctgaaatatgcgagtgcagtgtaagtggccagaatgtgagactcccaggtgaagtcgagggtgaagagtctacatggaagtgtgctctctcaccgcccccctacaaatggcagaagactccatgcagactcacccccagtccaccgccagagttaggaccagcctctgactctgcgacttataagatgggagagtgggagtgcgggaactatccccctctctggaggaggaggaagcctcagggctgcaaaagctgcaggcacattcttctctggtgctctgccatgggattcatgctacagcctgcatgactttcagagccagagcttggaactgcttatcctatgctgggagtttcttttgccaagggttgtgtctcctgctgggagtgcaaatacatctacatcaccttccaggcagggagggagaggactaaaagacggcaccagcaaatcactttaagcaggcagcaaaaccacaaaaataaacccttgaaaatgggactgaatgacacgcccacatcactgataaatgccattttcagcagactcatctcttcgccagagagatcagtcaacttggactcttgttaccatcacatttggcaccaggtatctgctacactctacaaccattctcaagttcgtgtgcagttggccctgtaatggggagctgagttggtttgaaaagccctaattacaaggcttagtgtttttctttgtaaaagggatttttgagtttagaaacaaagtgactgtaggtacaaacagatgcaaagcttcaaaaagtagtttatttttcattctgtgcctctattcacccaaagcacaaccctccacctcactccatccctggccaaaaactgtggcagcggaggttggagaagtaagcacaatattttctttaggcttggagagtaaagacctccctaggtagcatgtcatttccaaatgttactatctttccaattgatctcatccagagttctttgtctcaggaccaagagaattaaggagcatggacacaaagggtgaggttggagtgaaagtttaataagtaaaagaagaaagctctctgccacagagacggagcctgaaagagggttgccgtttttacagttgaatgcaaaggcttttataagaaactgatgagggctgggcatctcatttgtgtaaggctcgaatttctggtagctccaccccatcctcctaatgcacctgtggccccttagcttgagttacttcatattgtttgttcttcttactgtttatgtgttagcggatggaattttccattatgggcatgtccgggcaagtcacctgtgtagcctttattacctgtgcagacgtaagcatgtctcaggcaagctcccctgtgcaagttcccttatctgtgcctgtagctcgagttatcaggctgttcctttgtttgaaagaattcaactgaggacccaccctaactgcctgcctgactggtttcttgttttctcttttctcactaattgcccttggaaactcaacattggagatcctcatggaatattgaggtgcaaggggcccttggagttgccctgttgttggggtgggtacctcagtgagtgaggtcctgcagggaggctgggctatgagcccctgcactcggcatcaggactcaactcctctggtctgtctggagtccttcctgggcattaccctgacttctgagcccctgcactcggcgtcaggacttgactcctctggtctgtctggggtccttcctgggcattaccctgacttctgggccccactcatgacagagatctttttatacagatgactttcttgctggacgtcatcttagcctcctttttttgtgcaacagtttagaagctccattaagaaaaaaaaaaactttattttttagaagtggactaatacatacctcaaactgtcaacccacattgtgatggtggagccatgggggtctccaggaagtggattattccctagacccctctcttccagagaagtgcatggtgtatgtgtgtgcatatgtctatgtgcactggggtgtgtgcctgtgagcacgtgtgcagggtgtgtgtgtgtgtgtgtgtgcgtgcacatgtgtacatatgtggaggccagagaagttccatttcggaagtgaatccaccatgttggcttctgattactcccagtttcaggaagacttctaagattttcagtttatctattgttccttgtgtaagagcaggtacttactgtaaatcctgcccttagttcaaacaaccttgatgttatcttacttcaatagttctacacatcccttctgaatcaccccttccctgtgggtctggggagtaatggtgtggggatgcatcaccttgtctcacctccaaccaggagacagacatggcttttgtttgcacatccctattacatgtttcttcctaagaaactggatttgtcagcctctctgttcatcctttcagcttcctcggaattttgagggtaggcttgcataggcctggctgctgtggaacagtgtgcttgtgtgagcacgtgtgttttgcctcttctgttagcatgatggccctggaggccagctctctgcatccattttctctgtgagtcctgcagcccccatccttaggagttaacagtgtctggtttaactcaggtgtatgggaagagagctggaagacgagtcaattactttttcaagtctagaccatccagactgactaagaaaggtgaaatatttcatcatgaaaacatttggagatctgaagatgggtccacggcaggatcacgttcccctcgccactgagattggttcacaggtgatcacataacccagggctaagccaatgaatgcacagtattccccttagccactggaattggttcagaattgatccaatcagagtgaagacagaactttttcaattgtaatagactattttttggagcagttttagattaacagcaaaatcagcagaaggtttcggaggattttcacatatccctggccccctcacctgtacatcttccccatcaacatctcacaccagagtgacacatttgctaaaatcgatgaacctacattgacacatcattatcatccaaagactatagttcacattaggctccattcttcgttttatacattctatgggtttggatacatgtacagtgacatatgttcatccttataatattacacagagtattttcactgccctaaaaatcctttgtgctacacctgttcattgctccctttccccaatccctcgcaaccactaattttctgatcttctgtcatagttttgccgtttctataatgttgtatggttggaatcatatagtacatggcctttcaggctggtttctttcatttagccataggctttgagggttccttcttgtcttttcatgtcttgattgctcatttctttttggtgctgaataatattccattatctggatttatcacagtttatttatccatttgcctactgtaggacatcttggttgcttttaagttttgacaactatgaatgaagctgctgtaaatatccataagcagggctttttttgtgaacatgagcttttaactcatttgggtaaatagcaaggggcatgactgctgctggatcgtatggtaagagcaggtttagttttgcaagaaactgacaaattgtcttccacagtagctgtaccattttgcattcctgccagcagtaaattagagctcttattgctccacatcctcatcagcatttgttgtcagagttttggattttctctattttaataggtggttactggtatctaattttttttttttttaatagagacgaggcctccctacattgcccaatctggtctcaaactcctgggctcaagggatcttcccatctcggcctcccaaagtgttggaattacaggtatgaggcaccggggccagtctcattgttttaatttgcatttccctaattgcgtactacagcgggcatctttttatatgcttatttgccatctgtacgtcttctttggtgaggtgtagtttaagatctttgacccatttttagttggattgttttcttattgtttagttttaagagttctttttatattttgggtaacagtcctttatcagatgtgtcttttgcaaatattttctcccagtctggggcttgccttttcattctcttgacagtatcttttgcagagcattacatttcaattgtaatggagttcagctcatcaattctttctttcatgaattatacctttggtgcatctataaagtcatcaccaaacccaaggtcatcttgattttctcctatgttatcttctaggaattttatagtctgcattttatgtttaggtctgtgttccattttgagttacttttgtaaaggatgtaaactgtgcgactaggttcattgttttgttttgttttttttcaggtaaatgtccagttgttggagcaccatttgttgagaggtctttgcctcatttgtactggttttgctcctttgtcaaagattagttgactctatttatgtgggtctatttctgggctctctattctgtttcattgatctatcaatgtgaccagtaccatagtgtcttgattactgtagctttacagtaagtcttgaggtcaggtagtgtgagtcctccaattttgttctcttttactatgtgttggctattctgtgtctctttttttttttttttttttttttttgagacagagtctcactttgttgcccaggctgaagtacagtggtgtgatctcggctcactgcaacctccgcctcccacgttcaagcaaattctcctgcctcagcctcccaagtagctgggactacaggtgcacaccaccatgcctggctattttttttttttttttttgtatttttagtagagatggggtttcaccatgttggtcaggatggtctcgatctcctgaccttgtgatccacccaccttggcctcccaaaatgctgggattacaggcgtgagccaccgtgcctggctattctgggtcttttacttctccataaaaactttagaatcggtttgtcaatatcctcaatataacttgcaggaattttgattgggattgcattgaatctgttgatcaagttgggaagagctgacatcttgacaatactgagtcttcctatttatgaacctggactatctctccatttatttagcttaaaaagttcttttcctcagagttttgaagttttcctcatatggaacctgtacatattttgtgagttttataactatttcattttgaagagtgctaatgtgaacggtattgcatcttaaatttcaaattccacttgttcattgctgctaaataggaaagtgattgacttttgtatatcaaccttgtatcttgcaacctcactataataatttattagttctaggagttattttgttgattatttcagtgtgtctgcatagacaatccagaccatctataggcaaagatagctttatttctttcttcccaatctatatgccttttatttccttttcttatcttagctaggacttgcattatctaggacatccagtgcaatgttgaaaagcagtggggagaaggaacatctttttcttgttcctgatcttagtgggaaagctaagtggagtttcttggtattaagtgtgatgttagctgtgggattttgtagctatttattaaattgaggaagttcctctctattcctagttcactgagtttttatcaggaatgagtgttgaattttgtcaagtgctttttctgcagctattgatataatcatgtgatttttcttctttagcctgttgatgtgatggattacattaattgatttggaagataagacttttgattcacagctgggaaacagaagctttttccctcctggaaagtgaggatgcaaacagtagtctgtgaccacgaggaaattcagagggaatgaagtctctggcattggagtcagagcaggagatgtacaaagaaacagagccaagactcatcaaacccatttgaggccctctacctcaactggagaaacctaatgcttcctttaaggtttagttcagtttgatttttgttgttgttgtttgcaacaccaaacatgctaactgatatatgccatacccctcaggtatttaagaagacgggggtcagggcacggtggctcatgcctgtaatcccagcactttgggaggccaaggcgggcagatcacgaggtcaggagatcgagaccatcctggcttacacagtgaaaccccatctctactaaaaatacaaaaaattagccaggcgtggtggcggatgcctgtagtcccagctactcgggaggctgaggcaggcgaatggcgtgaactggggaggcggagcttgcagtgagctgagatcgtgccattgcactccagcctgggccacagagcaagactccatctcaaaaagggaggctgagaaggtgtcagggatgttcagaaagggatttttttctgtgagttgaagacaggtctgtgaaaagctgtgtgaacttccttctagctgaatgacataacagataacacttgttctctggaaaatagatgtgcacacatgcatgcctgtgtgtgtgtgtgtgtgtgtgtgtgtgaaaggtgggaaaataatatgtcttacaggaataaaaaaagaacactaatatggctctttcaaacctcagcgaagctggtgggaagagcagctcaggcgcattttgtgaactgaaggttctgtgcacccgagtagggcctgagtacttccagggaggatgctcggcttctctctgcagaacagggtgtgcatggtctacagggaagctcctggcctcctgctgaaccgagaaataacttgaccaagggacggagcagggagagcaaacgcttcaatatctctgcctaactgtgtttaggcttgcccttgaagaggccagggtggaattgattaccacaagcacttccctaagaccagagatgttgccacattttccctgatgaatccattgtgttgtcaccatggcaaccaccacagttggggtctggcctggctggcgcatgcttgcaacagttcccttttaggatccaggagcatcctaggtctatgaaatcttgccctcagctaccacaaagtcttactcctctcagcagcaggtccaaattatccatgctgtaggcctcaatgttggcatgaattggcagcatggaattcactaggaagcattctttatttaaaaaaaaaaacacccaacattattatttagttcagttcctctgttctggcttcatgaaacttaaaaatgccctttgttggaaaaaagagatgatttggtcagctcttgctgaagcccaaataaagagggctggatttccccaccttgggtcacatgatctttgctaattttctctcacccccatctaagggcaccctgtagctggacttcagccatagaatgtgagtaagatgtatagtcagctgtttctatccatgggttttgtatctgtggattcaactgactgtgaataaaaaacatttgaaaaaaaaaacccaacaatttaaaaatacagattaaaaaatcaatatgttatgcagaatgtggatttaaataaactaaaacaaaaaaaccaaagttaaaaaggaaaacaaatttgaaaagtcagtatagtataaaaactatttacctagtatttacattgtgttaggtatcataacctagaaatgatttaaagtacatgggaagatacgcataggttacatgcaaacactatgtctttttatacaaagtactttagcatctgtggatatccgtggggggcgggggtgggtgggtcctagaatcaatctcccagggatactgagggacatctataattgtctttttatgaggaactcatcaatatggtgccctaaggccaattctaccgacactatacatggtaatagtcacaggattcacagtacctgtaactgtgaacaaatatagatccaccgaatggctaaacttgaaagaccacagattcagtagaagaatctcagtgggagcatctaaggttaggttcgatcacttcttaagtataaacacagtacacttttccatggacacacacatgtgacaactctcaggggcagatacagatcatttccaacagccagaaggcttcctcacaccccttgtgattcaacacataccgatatggtttgggcctgtgtccccaccaaatctcatgtagaattgtaatccccagtgttggaggtggggcctggtgggagatgagtgagagatgcgtggagtttttatgaatggtttagccccatcccccccggtcctgagtgagttctcataagatttggttgtttaaaagtgtgtggcagctcccctcactctctcttgctgctccggccgtttgacatgccagctgtccctttgccttctgccatatttgtgagagtcttgaggcctccccaaaagcagaagctattatgcttccaggatagcctgtagaaccatgagccaattaaacctcttttcttcataaattacccagcttcaggtctttccttctttcttttctttctttccttccttccttccttccttccttccttccttccttccttccttccttcccttcctccctccctctttctattttcttttctttctttctttctttctttctttctttctttctttctttctttctttcttccttccttccttccttcctttctttctttctctctctttctctctttctccctctctctctctttctctctctctctctctctttctgtctctgtctccctttctctgtctctctctctttctctctctctctctctctctctctctctctctctctttctctctttctttcttgacggagtttcgctcttgttgcccaggctggagtgtgacggcacaatctctggctcaccgcaacctctgcctcctgggttcaagcgattctcctgcctcagcctcctgagtagctgggattacaggcatgtgctaccacacctggctaattttgtatttttaatagagacagaatttctccatattggtcagagtggcctcgaactcccgacctcaggtgatctgcctacctcagcctcccaaagtgatgggattacaggtgtgagccccgcgcctcacccagcctcaggtatttctttatagccatgtgagaatggactaatacacacacccacaataaaccactactctgatttctacttccataggttagtcttgagattagccctgcttgtccttggacttcttataaaaaagatcatagcatatttagtcctctgtgtctggctttcctggctccttgctggatcagtaaatgtctccatgctgtttattgtagcagtggtccattttttttcattgttacatagctttccactgcatgcatagacctcaatttacttttccattctattcctaatggatatttaatattatttatttatttattttttgaggtgaagtcttgctctgtcgcccaggctggagtgcagtggtgcgatctcagctcactgcaagctccgcctcccaggctcacgccatcctcctgcctcagcctcctgagtagctggggctaccggcgtccgccacaatgcctggctaatttttttgtatttttagtagagacggggtttcaccgtgttagccaggatggtctcgatctcctgacctcatgatccgcctgcctcggccccacaaagtgctgagattacaggcgtgagccaccacggccagcctaatatatttttctattaggcatacaattgccatggacatgcatacacgtcttctggtgaatgtacatactcattactctcgggtaagttcccagggtggaaggactgggtaataggggaggtggatatttatttaactttagtagatgtttccagacatttttcactgtggctgtagtgacttgcattcccatcaacagcatgggagttaacagttgtcctacgccgttgctaacacttggtattgtctgtcttttgacattgtagctatttggtggatgtgtggacgtatctcattatggctttaatttgcatttttcttaggagtcatgacatgaaaaatatttttacatgtttattggatgttcagatctcctcctttgttaaggtttgttgaaatcctttgttccttatctaattgggttgcctttttcttactgatttttaggaattctttgtatcttctagatacaagtcactgtcaagtatacggtattacaaatgtcttcttcccatctgagatttgcctttttactcccttccactttcttaatgatgcttttgatgaatagaacttctgaattttagtgagtttgaattatcattcttttctttcatggttcgattaagaaattgcctatctctgcatgcagtttgatggtttctgtgaatcaagtggttaaagtgttgctgaaacaccaggggttcagtctaggtcctgctgcttgctacacagaaagccgatcattgatacaacaagtattgtcagggaagaaagctttaatcagatgctgcaggagtattgtcagggaagaagactttaatcagctgcttcagccaaggagatgagagatcagcctcaaatccgtctccttgactaacgaaaattaggagtttacatagcaggtacaaaatgtaaccatgtatgggaagacaggaaatagggaggggtaaggaagaggagttgctcaatagggagcaagtgatggcttaggcagacatgggtgaggggtctggtgtttcattgtctaaatgtagtcatctggtgagtttcagttccttgttactatctgggaggcctgatggttggtttcctgagaaagaactcagataagacaaatgtaactttctcaagctttgagaccaaacagggaggatcaggttttatgttcattcagaaaaaccctaagcatcagctctatgggacatttgggctagtttcaaaagataggcaggtggtgcaaaccaggccactgagaacctgtttccaaagctaaacagcttgaacaggaagcaccaggattcaaacctgggctttctggttccaaagagcacactcttacctgttgcattgtgctgcttctttactaatcaggactcctttggttgtgaatggttgaaatatagctcttaggttaaaaagataaattattggttcatgtacaagatccaggatgtctcgcttcaggcatggatggatccaggtgctcacatgacattattagcattgggtccctcccttcttatgcctctactttcctctgtgttggcttcatcagtagaaagcctctttccttttgcaagcaccagctatggcaatagcttctatttttcaaagatggctacaacaatatcccctgtttcaggcactcatttacaacgtggccttgatattcctcctactgagaagtcagtctatgtcctctctctttcatgctggacaggcttgtgactcattggaaaccagtatatagaggtgagaatgatgctgcacaacttgtgagactaggtcagaaaaagcagtgcagcttttgctttgtgtttggggacacttgcctttggaagcctgagctgacatgtaagtcctactgtcctgaggccgccatgctaggaggaagcccagactgtatgaagaggccacatggaggtgctgaggttgacagcctcaactgagggcccagctgattgccagcagcaactaccagattgagtgaagaggcttctagatggttccctgtgtttgatttttcctagctgaggcattggacattgtggtgtagcgacaaaccactctgctttgctctgtctgaattctggacccacgggacccatggaataatgaaatagttattttgagctctttgattttggaacaatttgttatgcagtaaatggaacaccaggtgtatcttctttcagccctttcagccctaccagaaagagggtcttcttgccaactgttctcaggcagggtaatccttgggccaggctgggtcacattccatcctaagtcaattgctgtggctaggaagatgtggtacacggatgggccagacctgggtcacaggcccaccgggagtggaccagccctgggaactgccacatggatttggggaaaggaagagaggctttctcaaggaaaaacggaattatatggaaaaaaattgtagatggaagatgggaagatgggcagggagaaccaacagctgctccttcagtagtttactatgaggtcactgtcctttgcttgtggaaatgagaagtgcccagcagtgagtgacttgtctgtgtgtttgggcagctcagctgttatgggagcaggtaggaggggcaaacccaggacaggcttccaggagagcatgtggctgtgctgacttcatgatgatgaggactcagacaggcaaaaagagcaggaaaaggagttccaggcaggggaatggcatgtgcaaaggcctggaggcaaagatggtgcagcaagttggagaacctgagtgaagttcagtggggtttaagccgagtgttagggtgaggatgacaagggaagaaggcaggggttggggctgtaggggcagacagtggcagggccttctcagccacatgtggcactgggggtgtctttaaatgcagtgggagacctcagtgaggttagcagggatgtgacgtgaccatagaaggtccctctgtccatggtatgggggatgaggaggaggggctgcccagggccagggtggtctgtgaggtgggtgaggccatcatgtaggtgagaaaggatggtcacctgagctagcagggtgatggcagaggaggaaggaatagaacagagccaagagccatttagcaatcaactcagtaggacttgggtttgagacaagagggagagggaggagataggggataagagagctgcccagggttctggatgggcctggagggacggggtcaccagtcactgaggcggtgacccccaaagagcctacatttgggggtgaatttatcgggctgagttgaaggtgccatgggacacccatgtggacctgcaggtctgaagccaggagagtggttggctggtgtggctaaggagtcccctgtgtgtctgtgaccccatgtgtctgtggtctaaggggggctgagacccccaggaggggaagcagagtgagcgagaggcagactcaatggagggaccccctggatttaggagcaggagaagaagaggacaagggtggcagagaaagcctggctgagcatgggaacaagaagggggccttcatcaattcctgctactatgacaatatgcctgagactgggtagcttataaataatagaactttattcctcacagttctggaggctgggaagtccaagacaaaggcgctgacaggttcagtgtttggtgagggctgctgtctgtgtccaaatgggtagaagggtgccagtcacatccaggagcttggcctcatgctggaatcacctcctgaaggccccggctcttaacactatcacgttggcaattgggttttaacatgagaatttcaggagacaccttcagacagtagcagaggggtagaccaggaggaacgacggcccaggaccaccctctgtggacacccaggagggactgggcgggtccttagggggagcacagggagctccataggagaggctttggggagcagggctgggaagcccagtgggagtgccggggtgagtggtggtgaggcaggggtgtagacactgaccgcaggacatagaatttccttaaagggaggaatgtgggctggagcgggggttgaggagaatatgtatgcgtggaagaaatctatgcagtgtccacagtctacagagaggcctgggctgcagaaggcaagccaggcaggtcgtcccaggcacagggaaatccccagagcttgggtttactgagcccgtcctgtgcaggtctggatctgaacactgtgtatgcagtatctcactgaagcccctcccacccgatgaggcagggccatcatgccacccattttaaagggtaggagactgagaccagagagggcaaataacctccccacagtcacacagcttggaaggggccgagtcagggttccaaggagagcctgtacccctccctgctgctcttagcctggctcagctgcagaagccgagccccagggaaggttgtggtttggggcaccccgtggcattgtgtgcacagggccaatgaggcgcaggactggggatggggggtggccatgtgtggcatcgttggtttctgtggcaggaaccagagttgtggcacccagggctgcagactccggttcctctctgctgagccccctttgggtcagggactcagttcctgattgtttcctgggctctggtttgtgcagtggcttgatctcagctcggtgcaaactctgcctctcaggttcaagtgattccgtgcctcagcctcccaagtagctgggattacactcgtgcaccaccagccctggctaattttgtatttttagtagagacagggtttcgccatgttggccaggctgttgtcaaactcctgacctcaagtgattcgccctcctcggcctcccaaagtgctgagattataggcatgagtcacgtgcctggccttggtctagcagtttttttcagacccagccccaatgggaaacagaggcatgcgctgcaggggtttgtggcagaattaagggaactgctaaatgatgaaagcacctggggaccagcaagagatggagctgcccagagcccagggctggaggggtgggtggaggagagtgcatgagtagcccagggagagccctgcagggaaggtcacaccacagggagagtagggaagaggcactctgacctttcccctcctgcctttgacctccagggaagagtccccttggctgaacataactggacgccagagggcagggagccccggagatgcgattctcaggggccagttctggaacagggagccccaggcagagaagggatccaagtactggggaaggagttggggaacaacaagctgaggcatctgtaccttctcccgacacttttgccccaggctgcagggggaaagtggaggagaacagaggagaaggtcccttccaggcccagtccaggctttgggagcacagggtgccagccaggggaggagagggagctttggagatctggaaaagccggcagagaggaagagctttaaggagagctgaaggtttgtgaccattgaagtggagggagggaagcaatgactgaggggcaatgagtgggctccgtgctcagcatgaactcagtatgggttattctatgttttctcattttaatgcattattttttttcgaagttccatactcttattacaaagtttaggtaatatgagagaagcaggtggcaagcacttgtctctccagatctgcttcctaatagagaggctggccggttcagggcttgacatttctgctcagattagtttttgagatatgatctaactgcctgttacttttttggtgggagttggaaagtatttcaaatactaatgtaagaaggccacttccttttttcacgttgggattataaatcatttgaaactgtttggggacaatgcattttacagacactctatctggccaggtacaaattgaacatttaagctcaagttcaaatgtctctcatccttgactttgatgtaaaaacatgtcatatttcactcgcggattgcatgtgaataagcaatatcagttctcagagaatggaaccacagcgaaagggaagatagtggttgtgttcattttcaagggttgccgtaacaaattaccaaagactgggtggtttaaacacaagaaatgtatttcctcggcattctggagggtagaagggttgatttcttccgaagcctttctccttggcttggagatggtcatctgctccctacatcctctgcacgtgtctgtgtcctctcttctttgagatgctggttgtattagtctgttctcacattgctgtaaagaaatacccaagactgggtaatttataaagaaaagaggtttaattggctcacggttctgcaggctgtacaggaagcatgatgctggcatctgctgggcttctggggaggcctcaggaagcttccagtcatggtgggaggcagagggagaacaggcacctcacgtgggagcaggagcaagagagaagaggcaggcgctacacacttttaaatgacaagatctcacaagaactcgctcactatcacaacaacagcacctcagggatggcgctaaaccattcatgagaaacacctccataatccaatcacctcccaccaagtcccacctccaacactggggactacaattcaacatgaaatttgggcaagatccaaaccatattactagtcctgttggatttggggctggcacaaatgacctcacttaaccttaattacctctttgaagaccctgtctccaaatacatcattctgaggtcctgggggttaggacttcacatatgaatttggaggggaatccaatctggtccataacagctactttgtttttaatgaaagcaaggcttttccttctttttcaatgatcccagttcacacccaaatctgtcatctcctgattctcagaggtattaatcaagctgtcagtaagaatttaccaaggacttgttctcagattcaaaggatagtgaatggcactaggacagttaaaaatcagatgctaaattcatagcacatatggtctagctgggaagataaaaatacttagcttttgtattaagtatttaatttaaaaaaaccctccctttttattgccaggaaaaacctacaagagaaaaaccatgcttggagaacatcagagattcttttggctagcagagtttgtagttttcagtctcttaagggatatttcatgttgcccatatacaagcctcagacgccccattttgctcacatgcaatagaaaattaggccatttctgttccagtgactcagcaccaaagaagtcatccatctcagatttaaaattaactgcgaaatgcaaaagagacaactcagtatagggggagtgaaagaagtaagatattttgcaagcttaaaaacattttggaatgaaaatcatccttgtaaagctggaaactagaagaaaattctgccaatttctttttgtaaaaaaaatgtatcttgaaacttttaaggagtattttatcaaaggatccattcccagcaatgttattttgaggatctatttgataccagctgacatgcttctatttagcatttcactgacttcaaaaatcacagcacccaaattacaggctctaactgaagaagggagtaggtctgtgagctgagtttgattaatgtattcacttctatccctgtctctttcttgcctttgataatgagtgaaactgctgcatgagttactcatttattttggaagaaaagaaaaggaaaatggggtttggtggctcccaggtgagctgactcttcatgtacgtcttccttgtggtcatccgcattgaagcaggtcactgtacactggccaggcttgtgcagatgacttatgaacctggctggtctgctttagatgaaagcatgatggtgcaggaggtcctgtggtccttctcacaaatggcgaggaaaattcttcaccagatgagtgtagcctgagatgcttttgtgaaggttgacatctgcttgtgatgtgatgtgatgtgatgtgatgtgatgtgatgtgatgtgttccttagtcagtttccactgagggcagataaagaaaggctgtattagtctgctcttgcattgctataaaaagcaaattacctgagactgggtaatttataaagaaaagaggttcaatgtgctcactgttctgtaggctgtacaggaagcatgatgctggtatctgctcggctgctggggaggcctcaggaaactttcaatcatggtggaaggcaaaggggaagcaggcacgtcttacatgtccagagaaggaggaaggtggggaggaggtgctacacacttttaaacaatcagatctcacaagagctctatcacaaaaacaccaaaaggggaagtctgcccccaggttccaatcacctcctaccaggccccacctccaacaatggggattacaatttgacttgaaatttgggtggggacataaacccaaaccatatcaaagtctcattttttcaagagagagattcgtttatatggtgtcttcaaacagggacttcttttcctaagttactccacagttgacccaactgaggaatccctaatgcttcctcttgagctgaagcaatgcattctcctagagatctgcatggtaaccacctcttcaatcccatccaaggaaaccctgacccagtgacgtgacctgcactgttgtctggaaggactcatctgggttcaggtgtttctgtggttaaggttctcaaattgggatctttcgtgattacctgtgaatacttcaatgaggttaaaagtgtaaccagatgcaccaggaatgtgaaaggaatattttgtatttttcaatgaactatccacagctaatactttttatcttcaatcagtgtttcccacgtgagaagccagcaccaccaccttcatcaatatcaccatgactttcatcgtcatcaccattacaaccaccatcattaatatcaccatcaccttcacgtaactacctccacaaccaccattctcaatatcaccatcaccttcattaccaccactacaaccaccatcaatatcaccatcaccttcatcatcaccaccaccacaaccaccatcaatatcaccatcaccttcatcaccaccaccatcatcatcaatatcactatcactttcatcatcaccaccagcaccacaaccaccatcaatatcaccattaccttcatcatcaccatcaccttcatcaccacaaccaccatctcacaatcactttcatcatcaccaccaccataaccatcgtcaatatcaccatcaccttcatcatcaccacaaccaccatcaaccatatcaccatcactttcatcatcaccaccaccacaaccaccatcaataccaccttcatcatcaccaccaccacaaatcaccatcatatcaccctcactttcatcattaccacaatcaccatcaatatcaccatccccttcaccatcactaccaacacagccaccatcatcaatatcaccctcaactttattatcacctccaccatcagcagcagcatcaacttcatcatcaccatcaccacctctgccatcagcagcatcattattatcttcatcatcatggtttcagccacaatcggaatcaacagccgtcacccagagttgaaggaggtaggaaaatgcttttgtaaagcacacctcaaatgaaaaaaaaaaaaagcttattgcctataaatcgaccatggatttcttggaaataatttctaattcattcaagattttaagcatgctaactgctttttattatgaaaatgctgcaggctacttttagggaagggcaagaacacagggtctaaaaatggtcctagttaatggtgaattttgaaataaatcgatgctatgcttgatatattctgaattttatatgttcaaagtggatgggagaaaaatgaatcacctgtagagaaaatatatgtgaattctcagaggacttttaaaaagtgagaccacttagatttgatacaatttgagttgatccaaatcctgccatgtcacagggtttatgaagccaaatcaaaagagaggggaaacattcacctgtgttaatattcatgcatttattattgttctttctcttcataaagtagagaatttaaaggttattataaagctctcccatgaattattctgtccagtaaaagtaagcagctgctaagggggagagaaataaaactggaaaacccaagtagtcctatgaaagaaagagtgtgtgactatgtcagattttggggtgttttcctttgctccaatgaccattagaaattccaatcgaagtgaactcaacttagaactcatttatgcctaaaccaaaccacatcttgcaaacctggaaggtccccaaattgtttcaggttgaagctatggggagtgtctttgcttgggttctcccacaagcagagcctgagtcaagggcttgggttcagatagattatggaagcaatcccaggaactggaatggaaggactgggaatagtgaaatagagaaagagaagaagctaatacaaggatgcattttgagttagttactgtgtggcagttttaaaatatggctgcagatgtttgatgctcctccaatctagaggtgggctctatgccccctctcctttcctgtgactcttccggctagcaaaagttatgctatgtgattttccaaggcttggtcataaaagatcatttagcttccatcttatttgctaaaacacttgctcttggaatcctgagctaccatgcctgaagtctgccatgctgggaggaagcccaagccacgtgaggaggctacatttaggccctctgctggggagtcctagccaaggctaatctgtgagccattgcaggcagacattacacaagtgattgaagaattctgtcatgattcaagcctctagtgatttgagttgctggcagtatttcaactctttccagcagaggcctcacacacattagggctatgtcttatctgattttctgactcacagagtcaacgagcagaataaactggttcttgttttatgtcacaaagttttgaggtggttggctatgcaccaatagacaactgggtacacaggtggacaactaggctcaatccactggagaccctctcagaaaccatgtagaatgtgtccctcattgtctgctgagacatcaagaggggaatatttgaatatttgccactgactccagactccctccctttccaacctggcactgtttttatttattttatactttgcatggactttttctccagatatttgcatgactgtatcatttactccctaagatccatgtgcaaagtttgcctcctcaaggagcccttttctccctattcctgttaaattgcatcctctcagccttcttctccttcctgctatattgatctccatggcactcatcaccctctaataaactataacgtttccttattatttgggttacttctttcttctctttattagaatataaactctgtgagagcagtaatgtttgtctgtttgctcagtgatgtagtcttggcccctagaaagtgcctggcatagagtaggtactccatagacacatatggaatgaaacaaacatgaagtgaggtggagaatcctgggggtgagggagaggaaagcctggtggacaggtgtcaggggaagtttgctggaggaggtaacagttaagtttggcccagaaggataagaataggctcattggctgaaggtgtggcagaaagggtatcccagatggaggggacatctgtgtacagaacttgccacacacgagaaacttaaaggagaccaatgtggagtggtaggaatgggggtggggtagtgacacaagatgagactggagagatggcaggagtgacattgtacaaagaaagatgtggctctttgtaagagctatgtcataggaaggaggaaagcatttgccagtttcctaatagagcaaaacatcaagctttcttctatgcccaagtgtacccaagacccctaaaaggtttgcctggagaggaggcacagtgactctacgtcatccaagatcccctagaaatgcatactcaacttgatcacttaaatattcaaataacatttcccaattatcttctcttttgagacagagtcttgctctgtcgcctaggctggagtgcagtggtgtgatctcggctcattgcaactgctgcttcctgggtccaaatgattctcctgcttcagcctcccgagtagctgggattacaggcgcccaccatcatgcccagctaatttttgtatttttagtagagatggggtttcaccatgttggccaggctagtctcgaactcctaacctcaagtgatccacccacctcgacctcccaaagtgctgggattacaggcgtgagccaccacgcccagccaaataaacagaatttcaagccacgtattttacaagttaaaaatcccaactggcaaagaaactctcagttctttttatcccctagccgaacaccgtgacctctttacagatcctaaatgttttactgaaaaaatatagtgacctcttccaaatgcatgtggtcaggatcctctcaaaagcctctacgaagacgtggatccacaatgaagaggtctgctcgcccctctgccgctcagcctgttcctcaccagagtcaccgtctctcctctccaggcaaaggttggaggggccttgggtatagaagaaagcttgaaaggatgtttatatgaggtcttagaggtgaagtcctcaaacagtagactccagcatccagatctttcctaggtttggtctctgcattaatcaggaccctagattacaagtgacgttttgctctattaggaaactggtgagtgctttcccccttcctatgacacagctcttacaaagagtcacatctttcttcgaaatctgagactgggggcttttctacagtggcatgagttaacttgggactgaactgtcagagtgttccagcccttttggccacagagactggctcaatgagatagccaaggggtccagtcagagccaatgagacttagctctcccatggaaactgagggatatgaaactcacatctctatgggagttgctggatctgccagaagccacgccacgccacaaagagaggctgcccaagaatggagcccacagaggggaaggcagacctaaagatggggaagaaggctgcctagacctagaacctgaagttaaccatacctgaaagtctatatttggagttttaaaaagatatgatgaactagcaattgtccattttatttgagccatttgatttgatttctgccacctgtaatctaaagtcctgatgaatgcagggaccaaacctagaaaaggtctgagatgtgctgatgggtgccagagtcggctgtgcaaggacttcagctctaaggcctcatagagaacatccttgtgatttaaatgacatatcatcttttaattggggctgatttaagctttcattttaacattgttccaacttctgcgggcctcagtttagatcacggtgtggtggttgatcccctgatgctgtgtaagccgaggactggcttcctgtgaataaggaggcttcccaggctgaaccacacccgaaactcatcagcctctttttatcatttcctgaaagaaaaaaaaaaaggaaatgcaaaagacacaatagttaatatttggcagaaacagatacattaaattaaaatttaaaactttgattttttggaaacttcctatgaatactgtttggtttggactttccttttgtgtctacacttttccttctcattacaagttcaaaatgttagttctggttcattttttatttcttcttaaatactggctttaattcccggagggtcccattgtctactaaagatgtttaaacatgatatgtttgaggttacaaagacactttgagtattttcttaaaaattcttttggttttggcaaggtttagaatccataaacacactctgttctgcgttcttttactcactatttacctatttctttataaagtggtgattttccttctgtttgagttacgttcatgctcctcattcgtctcatagtttgctgtcatagggacaaaaaatttatttccaaggaaagaataatttatatgtgtttccccaatggcccctaaataagtaaattccatcaatgtatatatctggtattggtgtatgaaatcttttattcagagacatacaaatgaatcttggcaatagaacgtgtataatacaatcttggcattacaaagtgtatatcataagggaaaagaagatgtcaagcattcgtatctttcccaccagtggtttccataagccgaagccacaaggatcaggatcgtcatgagagaaagatgaggcaggattttggcaccaaatttcctgtggttggaatgttgcttaaagtgagtaacaactcgctgctttgtgtaactgtatatgtggagtaataaaggcagccttctgttatcagtaatagagatatttgtttaaattctttttagcctgggaaaacatacaatgatcccacatgagcctgagactcttcctggaggccaactttctagattttgccgggaagcatcttgaggacctcttgccttgtggttgcaacacaggaggcagcattgattctctgcctctgtctttgggtcctgcagggcaggcagctgccaggggctggtgggcgcagccccagcagggtgagcgcatcatctccaggcctcccctaagagacaacctgagcttcactttgccaggtttccactactctggttccatccagaactgaccaggaattcgccaaggacagccagctcctcccacttggcaaatccactatttacgtccagggcaagtcctccaaaggccagggttaaccaggaatcatctatctggccagaaaataaatccaccaggttcttcggtccacctctttggagaaggacccatggaagggggtcctgggagcacaacctgccctgcgggctcacgtgtgacccaggaaagttctccacctcctgtgccttttttccccccaacaggaagtgggctgagagaagctctgccttcatagttcctgggaggcatgaactggttgctgcatgctgagcatttcaaactggcacacggtagggctacccatgtctgagttattgttacattggtgattcttatagccaaaggggagtttctagtgctgacttgagaaagttaccagtgcccctgatatggtttagatatttgtcccctccaaattgcatgttgaaatgtgatccccattattggaggtgagacctggtgggaggtgtctgggtcatgggggtagatctctcatgaaaggcttggtgctctctccctggtaatgagtgagttcttggtctgttaggtcactcacgatctggttgtttaatagagcctggcacctcctcccctccctcttgctctctctcttgccatgtgacatgcctactttcccccatgatcggaagcttcctgaggtctcaccagaagctgaacagatgcttgcatcatgtatcctgtgcaacctgcagaaacgtgggccagttaaatctctcttctttatcaattactcagtgtcaggtattcctttatagcaacatgacatggactaacacacccccaaagggggaatgtagacaaagtcttggttcttagaaggctatttttgtggctaacatccagcatcaaataatgtctcaaaaatttaaataaacaaaaaaatatttaaagtcatcctgtccagagaacatttgaagaaatcaatgaaaatttggggtctcatctggatgttgaaagccctctttctcctttctcatttttttctgtcatcctctctctcattcattcttcctttctccagctttcattctctctctttcttcctgtctctttctgtcttcctaattgcacttacaagatgactcagtctctaatgagggccctgaagtctactgagaagtaagtataacagccggagtaatgaagaatgtgtccttgattatatcgggtatctggaatcttgacatttgtatgcagttaaatttatttccagtttacagcctgggcttatggaggggactggggctaagaaagcacagccttgttcaaatgcaaatggcagtcttgaaggaccctgtaagaatgccatcctctaaccattctccctcctgcggttgagggtgccactgaggatggtgaggagcaaggtgctgtttgaaggaattgctctgttcctgccagtttccttcataaatcctgggctcagctctgcccaggcagcaccagatctgggtcttatgctgttccacggtctgcctggggctcagtccctgggtcgggactggcatatgggaaccaggatgctggtccctctgtacccatggcctcctgtccagaaggcccttgggagggcagcctggagggtcagtcattggcgcctctcaggctttcagatctggcaatttttcaacaaagccaccaaagacccagtgtccccttcccagttggtggtgccaccaaatgcccggttcctcaagccagtgagcagacagcatcctcaggccctccctcatcttctagctgccatggaatctattaaattgaaaatgcacccctgtctgtccactcctctccacaccctgctgctgtccccaagtctgcacctctgtcctcacctgggtcactacaacagcccccatgggccctcctgctcccactcctcttcccatgcctgaaatctactctctgcgtgtatccagagtgagctcctgaaaatgaccatgtggccctgagcggatgtttcagcggctcacactgcactgggaacagcagactccacctcctcatcacctcccacaaggcccagcagagtcctgctggttccccagatcacttcccaccacctcccctcactcccccatcccagccgcactggcctctggctcctcctcccacgccccagtcctcctgccccagggcctgtgcacctgctgctcctgcgttctggaatgctcttcccacagccgccctctgacctgcaccctcttgccctttgttcttcacccaggtgtcacccactcagagaacacccctgaccttcccaaggaagccctctgcactccgacgccatatacccgtgatctgcacaggactgtcaccatctggaattgattgcctctcttcccgttttgctattgtcatttgcacccacaggaatgtcacccacatgagtgtggaatttcatctgtctgttcgctgctggatccctgctctaagtaagaaaaggacctgtggcagagtgagctctggatgaggatttgctgaggaattgaatgagggaaagactcagagaatggaatgctgagaattctacaataaatatttgaatcctagagtgttggagtcaggagaagccctcggaagccatctagacaaacccattcatttgcaaaggggtaaactgaggctgaggagaaaaaagtgacttgctccacatcccaaggcctgagggtcttctccctgctctgatgggagagggaccccctttgtgctgttgtgggtaaaatggtgatgtgtggctggagggtgaaggggcttcttctgccctttgactcattgcctaggaaaatagggacaaaaggcgcaaattttttcaaaatgcaaacaactaaagacaacgtcattcagtagagacaaagtgggtgtttgggttgacagagaaacagaaaagcttccctgaggttgaggagggaagagggggcttgaaggtgggtgagccccaaatgtgaccttcaactcctgggaagctgtaggcaaggacatagccaaggcaaaaccatcaagaatgtaattcaccaacagaaacattcactgaccaccctcggggcctgaaggtctttccaaaggtgagtcagagtgggtgcttggatgctgatctggggaaaaggggaagctgccctgagctgaagagtgtccctgccaaattcatgtccactggaacctcagcgtgtgacttagctgaaaacagggccctgccatctcatactgtcctcctcggtcacactggctggaggcaaagccctctcccctgtttccggaaatctccaaccctgtgcaccttttatcagtcttcacttgggtggatttttctgttctctagagctcaactccaaccgcccctttgccaaagggcttccttgagagctgttctggcagccgaggctcctccctctcctgctggaggtccagggtctgtgggtgtacagaggggcagcctggcgagggcagggactctggatcttttgtcctctggtgtgtccccaggacctagacccggcctgacagtaggtgctgcactactcctggtgaatttattgttagaaattgacaggtccttgctattcatgtctgtttcctccagccttgctgctgagcacatgatgaacttcaaacaatagcgaagtcaggagccaggcgctgatgacccccaggaggaagcttgcagaggatgatgggacagagggggatgggcaggagtctaagcaggcgctcagggaggccgctttcgtcaaggatgctgaaagaatgggggtctcatggattctgggagagatggtccaaggcagagggacagccagtgtgggcctggaaagatgtgtgccgcatgtctgaggggcaggggccaatgtggctggaggtagatgggagaggaggacactaggggctgaggtcagaggggacacaactggatctgtgcgagaccttgcatgccactgaaagggcgctggctgtcactgtcgtgaccagagcctctgggcaggtcttcacagaggtcaggctgactgcacttgcggatggattgaatagcagtagttagaggacagcatgcatggctcagggaggattcccaggatttgggatgcacagctggaagaagggaggagctcctgaatgaggagtgggaggtccgggaagggcagccttggtggggagagacgccgggacctgcagagaaactccctgaaaagaacagggctgagccatctttaccccaggctcaggaccttccttcgctgtaactgccaggacaatccactgtgctgtcactcagagagcgaaaccagcctgactttgcacctgtgtctccaagggataaaggtcaatgtcacagcagactccactctgatgctgtcttcaagccaaaaccttaatattcaatgagaaatctgcattgatgaaattttcattaaacaaactttatccctctcactcctcttgttattcgtggctttaagtatcaggctaatttaggcttgatgccccagtgatctgcagattggagcattattaaacatttagatgagcaatgatgagcctgagcctccctctcctctctcagctggagcacagggggctctgctaatgatcacaatggatttggggcagacacagcaattagagaattatctatagtttgagcaagatttgacccctctgtcttcaagggaaattagctgcttgacttacagagcacacaatttaattgataaaatgtatgaaaagaaaattccagccttagagccagttttacaactaacaagctgtgcaaatgcctgagcagacccctctttctttctgtacctcctcttgccccatccgtagagtaaggagggctagaccagggcagaggcttccacatgtgggctgtgggctgaaatcagcctggagaggggctctgtctggcaaactgtttcatttgtttgtttagtgaacactttcctagcactcatgattttgggttctgtgtgtttcatgtatgttaacttgtctcattctcccaataccccttgagataggcactcttattattcccattttagagatgggaaaactctgaccaagaggggttcaatgccttactgtgggtcatctgctgggcaggagtaaggcagggtttggacccagatggtctggttccacagcctatgctataaacttctgtgccaaactgtttttattattattattattattattattattggaggcataatgtttaaaatgaaattgtcagaaatttaagtgtgtgtgttcttgacatcaaacagcttatatgttacaataacggagctctcccaatactcagtccgccttcctatcttgccacaggcagctattaccaacgtgcccttagggtggaacattctcctcctggtctacctcagtccctccagtcctagagtctccccatcaccacggccaaatatagctcatctttgataactgaatttaccctcttgatcatgcttggattgcttcattgtttgacttacctgcttggtgctggtaggcatttaggagttgtttgaaggcatcagaaagcaacccaggctgccaggacttgagggtccacgatcccatggaaaagcgaactgcaacgaggtaagccctacattctccttgaagctagtagccttgaatctccttgagctagtagccaatttgtaagtgcagaggggttgagaaagcagaaagcagtggctcagagttgtatgccaagttcacagatctggggagacgaaagttgacattcaagctgacaagaaagccagggtttgagggacagagatgtcagagaaaatgggacccctgacagtgagtctgaatttctgtatcagtgtttgctgatccagaatgagatgctcagaagccgagctgaaagtgggcccccaaaagctaagaaaccaagcagttttcatcaatatcatgatgccgtaacaacaaaaattagggtttaagactcaacaaacaggagttctggaaaatatgcaagtctttcagttgaggtcctccaaggaattgccctagaagaaagatcaaaccaaaataaagtaggccttataaagacagaaaatcagccttaaattaccttaatcccagattgattaaggtaatctgtgcctaccatcgtggttgacagaagaatttattctctgggaaaagatatcaagagacactcagtttttcaaataaaatagccagaagtcataaaaaaaagtcatcagaagtattaataacaggagcaggtgcaaatgaccaaaaaccaagcaataaaaaaaatagacaacaagaaaagacccacagatgattagttactgaaatgatcagatacaaactttgaaatagcaattagtgatatattaatttaaaaaatgaaaagctggaaaatttcatcagaaaaatggaatttataaagcagaatcagatgaatagtctcaaactgaaaaataaaataactaaaattgaaaatacaagtgataggtacatcaacaatttagacaaagcaggagataggtgtgttgaaaatctacaggctgaggtatggcataaaaactttgaaaatataaaaaagagcatcagaaaatatagaatatgatgaaagatctaaatacacgtaattgaaattctaaggctgggtgcggggactcatgtctataatctcagcactttgggaggccaaggtaggtgaattgcttgagcctaggagtttgaggccagcccgggcaacgtggtgaaatcccgtctctatgaaaaatacaaaaattagcatagcttggtggcaggcatctgtaatcccagctactcgggaggctgaggcaaaagaatcacttgaacctgggaggcacggggtgcagtgagctgagatcgtgccactgcactccaacctgggcgacagagtgagatcctgtctcaaaaaacaaaacaggaaacaaattctacagaagcactatatgaaaatatattagctgaggattttccaaagctagtgaaatacgtgaaatcaaagattcaagcactcctagcataataaaaacaaggaaagatacacttcaccacatcatagtaaaactgccatgagtgaaagacaaagggaacatcttaaacacaaccagagaaaaactatacatttccttcaaagaagaaaccataagtaaacggcgaatttctcaataagatcgatggaagtggaagataacagaatgacatagattcaactgctgaaaaaacataattgcctgtctacaatcttatacccatcaaaaatatgctttgaaagcgaagatgaaataaaggcatttttagagaagtgaaaatcgacagactttattgccagcagatctgcactacaatgaacaccaaagagagttcttcgggcagaagaaaaatgattctaaatggaagtgtagacgcgcaagaaggaacggagagccacagaaagggttaatacattggtaaatttaatgagtacacaaaacaataacaagaatgtcccgtggggcttaccgtatctgtagaattagatgatgtgacagggatgatgcgtctatccaggaaaaatgtttaatggtgttacagtgctctatggttcctcattgtccaggaagtggcaagactctaatttagggcagaccagaatgactggaggagatatgttataatccctagtattacagtgaaagaataatgaagagattaagatgaacgagttaattggaattgacaaaatggaataataaaaatactcgataagaagaaataaggcagaagaagagaaaggtgatgcaaatcgaaaacaaatagtaagaaaccagacctaaattgtatgaataactgcattaaatataaacagaaagaccagtcttatttttaatccgtagagataaatgggtctgtttctcatctactccaaaatatttccaaggtagatgtgtgtatgaatcccctgaggagcttttaaaaatgtttaattctctgagcccaatttcagtagtttaggggtgggatttgagaatctgcatttttaataagactcagaccattcctggagaaacagtgacctcgcctgtggaatgggagggatagggatgaggggtaaactgttcacagaccgctttagttgttgtggagcttggagcttagcaaggggctggtacaaaaacacaaatcaacgcaatgcaataaattgtgaaagaattgtcttctaggagggacctctgttctcctgcaaatggcagatgagaggagtcacaggttttctctcctcttaattattcagatcttggcacctgaggagcagaccagctggggttaggaatccaaagcagggcaggatccgtccacacactcgtgtgtttatttatttatgcagctccagcaaagaaaattaaaaacagggctggcccctggctgggagatggagcctgacactgcatatgcgtctgtgagactcagtctggtcccggatgcccgactcctcgaggtctgtctgtgcactgggccaaggccctgctggccacagaacataggcggtgagggctgcatagggaggggctgtggtttcagaggctgacgcagctggctggccttctgctccttgtctcccggaggctccctgccctcagcaatagaaggtaagacaaggatcacatcccaaggtgggagggggctcgtgccagccctgaaggtggttggaaggtctttttgtagcagccaggaagggctggctctgcttctagatccacaaagctgcttggatgggggccgtctcaggcggagggccacgagggctgaggagtgcaggtctactctgcctcgggctgcccaggcgacatgcccaggggtctgtgtttctcctggagcctgtcaggtttgggagcacccagtgtggtggcccaaggtccgaggtccaatctagggaggcagtggtgttggtgaacctggccatgctaactttgcttaactctaccaaaaaaaaaaaaaaaagaaaaaaaaaaaaaggaaagaaagaaaggtgtggtaggatatgggtgacttctctcttttgtctttttctgtttttaagttgatagaatgtttttgtgttttgaacagtttaaattaagcaaaaagtacagaacgttcctataaatcccttcaataccctggtccttgccactttcctctatattaccatcttactaaacatttgttagaattgatgagtcagggcagggaatttaggggtggattagtaactgctatggagaaaactagggaagtgggaaaagttcaaagtcattattcattttcgagaaaacaaaaacgaaacagaacaagaaatgtgtaaaagaaagatgattaaattttatacctcatggctcagttgtggatgcttttacccacggtggtgtaaacactgagcatttctctttctccagctttctggaggtataattgacaaataaaaattatatatatttaaagtgtgcaaagtaatgttttgatgcatgcatatgttgtgagatgaatactacgatcaaagtaatgaacatatctgtcacctgatgtagttgcctttttttgtgtggtaagaatacttaagatctattctcttagaaaatttcacgtgtacaatattgagtataaatatacagtacattattcttaatgagagtcaccatgctgtacattaggtctctgaaaatgtgtaccctttggactgtctccccatttttaacgtctttctccctcccctcccctcccctttccttcccttccctttgacagggtcttgctctgttgcccaggctggagtgcagtggtgtgatctcggctcactgcagcctctacctcccaggcacaagcgatcctcccaactcagaatcccgagtagctgggactacaggcatgtgccaccacacccagctaatttttattttttgtagagatggggtctggccatgctgcccaggctcctctatatttcttacatatgtgaaggctcgatatggctctcccaggaagatgggcaaaggggaatgtgtgaggggctctggtctgagaacgaaatcctcatgatttttgcttcacagccagtagacagtaggtaataactagaaaaaagagcaaatagcaacctaaacatattactcagaaatgaggtgatactcgtagacatgctaaaattgctgaaaatggttgttcctggagagtagtagtgggggttggtgtgggaaactgcagcttttcattatcagccatgtaatcctattaccctgtatgactttgataaaaatttgaaagaatatgtatttttggtgtcgatttcatatgtaaatagatgcctctgagccagagtcagccctcacacctctctctgtccttcccacccccaacctggtagcaaatcctgtcggtttcactgagttcacctcttagcatgccacctctcccgctgtggccctaactgccatcatctcccgttggattcttgcgggtgcctcttcctgggtctccttgctcctccttggctgcagactgccttgcagatggtctattccccacagagcccggagggtctgccaacagtggagtcatctctgccactcctcaactcacagcagcctgtggcttgtctcctcccatggagtaaaagccaatgatgttacaagaatccacaaggccctggagggcctcaccattcccctcacatctatctgtcctgcagcacaatgctggtccatgcccaagagagactgtgttgcctggaacacaacaggagctcagcacagccgaggctcagggcagaacacgcttctcctccgacagagcaggtgttaaggaagtgcctgctattgcggtcactgtgaacattattattctagaatatgagcacattgtgagactcttgctgacttgtttggtgttttgtactgttttttttttctttttttaaaaattttcatttattatttttgcttttttattaaaaaaatttttttttttttttgtagagatgggtgggtgtggtggcatgtgcctgtagccccagctacttgggaggctgagttgggaggatcacttgtgcccagtaagttgaggctgaagtgagctaagatcatgccactgtatactccagcctgggcaacagaacaagaccctgtctcaaaaaaaaaaaaaaaaaaaaaaaaaaaaaaaaggctgggcgcggtggctcacacctataatcccagcactttgggaggccgaggtgggcagatcacctgagttcgggagtttgagaccagcctgaccaacatggagaaaccttgtctctactaaaaatacaaaattagccgggtgtggtggcacatgcctgtaatcccagctactcaggaggctgagacaggagaatagctcgaacctgggaggcagaggttgcggtgagccgagattgcaccacgacactccagcctgggcaacaagagcgaaactccatctcaaaaaataaaatttaaaaaaaaaatagaagtacattaaaaatggggagacagtcaaagggtacacatttccagagacctaatgtacagcatggccactctcattaagaataatagatctccctatattgcccaggctggtctcaaacttctgggcttggatgatcctcccccctcaacctcccaaagtgctgggattaaaggtgctagctgctgtgcccggcctatactctttcgagtggcagctttatacacacgaagcaggctacaactgctggtttctcatgtatgagggaaacacgaaatgatggagattcactcctcttcgtcaccctagagggtggaactgatacctttaaaggctgtctccaaggaactgggctggatggaactgccacgagggtcacaggggctcaacaaaaaagcccttctgcagccatgctcagcttggggcctggagagctgctctaaggtgccagagcttggttggcagggggcagagactgggtcccacttgtgttagagggctggccccctggggtcaaaggggtgctcccaatatgctggctgggagcgcattcttagctggttctcaggcttcagtcatggagactgaaggaccaaggtggaaagtcaaggagaacgttccagcttccaggctgcatgtccacctgtccacgctgcttatcgtctctcttcttctttctttattaggaaatgttttgtattaagtagagcccacttagagcatcacaattattttatatatttttcaaatcttaattttatttttaaactcacaatgaatacaaaaaatagacttctatcaaaattgaaacaatttgcaagtgtatgggataaaagcatcctcctttcccacaatttcacttccctgctcagtattatttcatataaatagcctatgttcttttagattactttctatgcatgtacctctataaatgtgggcatgcaaagtgcatatatgtcagttattcatacagataaatatatcttttctttcttttttttttgagatagtctcgctttgtcactcaggctggagtgcaatggcgcaatctcagctcactgcaacctctgccttctgggctcaagcaattcttctgcctcagcttcccgagtagctgggattacaggtgcacgccaccacacccggctaatttttgtatttttagtagatactaggtttcactgtgttggccaggttgctctcgaactcctgacctcaagtgattgcctgcctcggcctctgaaagtgctgggactacaggcatgagccaccgtgcttggcctataaatattattcgtcacctccctttttcatgtaatagatgtctgggacatagccctctgccagtgcacagtgacccaccttatttctttaaatgcctgcatagtcacacactgtatgggtgcaccatatattatttaaccattgtgttatagacaactaagtatttttcatttgcttatatattcattcattcatttacttttgctgttataaatattactgtagagaacatctttaaatttttaacgacatcctttgttatgcaaaagttttaaagtttaatgtagtcaactgcaagagaaagacacccttaactgatttaagcaaaagtaaaatgtattgatttatacaactgaaaaactcaggagtgagacttaggtagatttaagggattaaataagccaccaggattgtttatttcagctccattctcctccatgacagagtcattcttgggctctgcaggaggtaagatggcttctagtagctccagaaccatttatgttttaagtccacttaaaatgatttgagcagaataatagaacctcagtctaaaaagtggcttagttccccctttccccatcccaccccacacataacgagaagcctgaaggtaagtagctcagagaatgactcagtaactcaaaacctaaggctctagggagatttctttgtaattccgtgatttattttggtatagccccaaaatggctgccacttgctgtgttcacacaacagtgtccaatgaaggtaggaaagcaagccttttgtcaggcacatctctcttttatcagacacgtcaaatcccccccagaaccctccacctccccaccctacaccccaacagacactccctcagagtccactggctggactgattcatgtgattctgccttccctgcaaaggaggatgggaaagcaaggaacgggcactctcagcctctggattggggaactaaggggtggggagctgttgggtggacatccagcagagcctgacccagggagcatctctcccagtcactcctgctccagagccagggctcactctgcttggattaattcctgccacatgctcatcctgaatcacttccaggtcagagggatttaccagctaattggccagacctggtcacgttttctatccttagatccaaacctggagctcatcttgaacctggtgatgggcaacaggagagtgactgcttggttaccagggtctggttaccagaagatggggcaatgaatgccagaaactcaaattatgaaatttgcactagcaaagccacatgcacttggaataatcattattggtgttcttgtcaatttcagagcatgagtttctggctaatgctgacttttagtaacttcctctccatcactattatcctctcagcagtgaatggtgaaaaggactttttaatgagctcttttccttttcctctgcacttcccttgttctcaccttcccctacccaggcaatctgcctctctggaaatcagtgtcttttaggtgagaattcagggaccctcagtttagaccagtgtcactgtgggccaagttcagtgcccagtaaagccacaggtatctttcaaagtctcacttctagcctttacctctttagatactctgtagaggtagatgtcattgtgaagcataatgacatctctccatcttctacgggcattctacttcaccatcctaaatgcaagccttccaatctgacttttctctccccacgtacccattagcagcttataaagaatcagaaccacaccaagccttgaaatcagtgtgttccagcatgggctcagctataaaaacaatttgagtgctcacagctttaaaatgacttggcagcctgtctataaaatgtcctgtagcctgaaagcgggtgagaacatgcctgcatacattagtgatccattgattgtttctggagctaggtaacctttgtatacgaaaatgagagaacagctgaggcctgatcaatcaaaccagccattaagaatcttgcctagtccataggcctgctccatctcagggttcccagggagaaaaataaaaagaaaacaagttttagccataaatgcggggaataggagacaggtctggacaaaggttgggaaggttgaagatttcattccactggcagtttgtgactttccctaacccactcctgggctaaatacaggggagcaaaatgcaaaatgacattggggttctgagaccacggcataccctgtaagatgattgtcctgccatttcctgcagctgcctatctacaggcaatagagggtgcacatgtatgatcagggcaaataaatacagggaagggggcaggggaagaggactccaaatttgtctcttctcagcaagaggttctctgtgagttcttttgggccaagaaacaaaattcaccatccccagcctaaccacaaactatgactgtgcctaattcaataaaaatatcagatggggagaatggatgtcaattacctggagcttcatattaaacagggagtgatggattattaagtagtattctgtatttaacctcagatatttcagaaattttgaatacaattttctttagcaggaagttcattttaattcttaaaaaagaacatacacttttagaggatatatccttcgtttaaaagtctaatttgggaaacactcatatatagccaagagatttggagggatgttcattgaacatagtttgttttacaaaaatttggaagatgtattagtttcttattctttctgtaacaaatcattataaacttcatgtcttaaaacaacacccgtttattctcttacagttctggagtctgaaatgggttgacaaggctgctcttggggagaatccatttccttgccttttctagcttccaaggaccacctgcattccttagctcatggccctatcctccatcttcaaaggcagcaatggagcatcttccaatctctctctctctctctatttctgttgccacatcactagtttctgactctgtcccctcttcctcctttttttttttttttttttttttttttttgaggcagagtctcactctgttgctcaggctggagtgcagtgacgctagcttggctcactgcagcctccatctccccagttcaagagattcttatgcctcagcctcctgagtagctgggattacaggtgcatgccaccatgcccagctaatttttgtatttttagtagagatgggattttgccatgttggccaagttggtcttgaactcctggcctgaactgatttgcctgcctcggcctccccaaagtgctgatgttacaggagtgagacactgtgctcgttcttcctctaaaaaacaacaacaacgacaacaaacaaacaaaaaaattttattttaggttcaggggtacatgtgtaggttttataatatagataaacttgtgtcatgggggtttgttgtacagattatttcatcgtccaggtattaagcctagtacccattagttattttttcctgatcctccacctcctccaaccctccaccctctgatagatcccagtgtctgctgtttctatgtgtccatgtgttcttatcatttagcttccacttataagtgaaaacatgttatttggttttctgttcctgcattagtttgctgaggatgatggcctccaactccatccatgttcctgcaaaggacatgattttgttcttttttatggctgcatagtattccgtggtgtatatgtaccacattttcattatccagtctaccatttatggtttcatgtctttgctgtcgtgaatagtgctgcagtgaacatacaagtgcatgtgtctttatgatagaatgatgtgtattcctctgggtacatacccagaacagacgcatgccaccacagaatacatgtggccggccgggcgcaggggctcacacctggattcccagcactttgggaggccaagtcgggcagatcacgaggtcaggagatcgagaccatcctggctaacatggtaaaaacctctatctactaaaaatccaaaaaaaaaattagccgggcatggtggcaggcacctgtagtcccagctgcttgggaagctgaggcaggagaatggcgtgaacccggaggcggagcttgcagtgagctgagattgcaccactgcactccagcctgggggacagagcgacactccatctcaaaaaaaaacaaaaaaacaaaaaaagaatacatgcggccaagaagcatatgagaagaagctcaatatcactaatcatttgagagatgcaaatcaaaaccacagtgagatatcatctcacaccagtcagatgggctactattaaaaagtcaaaaacgacaagtggttggtggggtttcagagaaaaaggaacccttatacactgttagtgagagtgtaaattagttcgaccattgtgaaaagcagtgtggtgattcctcagagaccttcccccgtcttataaggatccctgagattacattaggcccttgtggacaatccaggttaatctttccatcttaatattcttaattgtatctgcaaagtccctttggtcatgtaagataacattcacagattctgtggattaggatgtgaacagctttgggggcacaattattcagtccaccccaaaataatttacagcagtcagaacagcctagcttatgccacagtaataagcaccatgactgggcacgctggctcacgcctgtaatcccagcactttaggaggccaaggcaggaggatcacgaggtcaagagatcgagaccatcctggccaacgtgatgaaacctcgtctctactaaaaatacaaaaattagctgggcgtggtggtggtgcgtgcctgtagtcccagctacttgggaggctgagacaggagaatcacttgaacccgagaggtggaggttgaagtcagctgagatcacaccactgcactccagcctggccacagagcgagactccatctcataaaaacaaacaaacaaagaaagaaaaaaaacaagcaccacaaaaataccaggggcttgaacagctaaggtttttaatttttttatttttttttattttttgagacagagtctcactctgtcacccaggctggagtgcagtggcacgatctcggctcactgcaagctctgcctcctgggttcacgccattctcctgcctcagcctcccgagtagctgggactacaggcacccgccaccacgctcgactaattttttgtatttttagtagagacggggtttcacagtgttagccaggatggtctcgatcccctgacctcgtgatccgcccgcctcggcctcccaaagtgctgggattacaggcgtgagccagcgcgcctggccctgatgttgtttttcactcatgctgcatgtgcctcaggtaggtggggcttctgctctacgtcatgcccactcagggatcctgtagagggtgactttctcttcatgctcctgtgacagcccaggcaggacaaagggcacctggaagatcagggactgcctcttaagcttctgcctggaagtgacacataggacttgtgctttcacttcattgctcaatattaagtcccaagatcatgactaccttcagtgcagggcagagaagggcagttgcactgccacctgcccagagggcagagaatcggaactagttcacaaacgtcctcatgaccactcacagcctaagtgtccatccttaggggaaaggtgatatgaactagggtaatatgatttggctctgtgttcccatccaaatctcatgtcaaattgtaatcctcaatgttggaggaggggcctggtggcaggtgactgaatcatggggacagacttaccccttgctgttcttgtgattagagctctcctgagatctgcttgtttaaaagtgtgtagcacctccttactctctgtcttctgctggccatgtgaagatatgcctgcttcccttccgccttctgccatgattgtgagtttcctgaggcctccccagaagcagaaggctgtgcagcccacagaaccttgagctgatcaaacctgttttctttataaattaccctgtatcaggtatgcctttatagccgtgtgagaacgaactaatacatgggggttagctccagacatagacacatacagaccacagcaggtataagggaggaggtatctgtatgcagcaaggccgacaggtctctagtgcatctggttgaggggggaaaagcaagatgctagaccatatgtgatgtgagaagccatctatagaaacatgtgcatacaaaaatatggtcttgtctttataggcacacaaataggtagaactggggaatcaggtctggacaccagcacactgatatcaacaccatgggcagttatggagtggggtcaggcccaggaaggagatgatgaggggggactttgctcctgtttatagcgttttgatcttttaaaatatttaaataattaaaaagttcctctgtctattatatggggagaatgcattagttattgtctgcaattgtcttaccaaaggtagaataaaattactgataaggattccttaggtgtgggagtggggagaatggagggtgagctggagaaatcaccaaagagagctggaggctgagctgttggtgtctcagaataacagagataaaaagatcctggggcattatgttgctccatgattcatttgcttgcatgtcaacagtggtacaactcaggcctgagaaggagtgacctactcaaggccccagggctagttggggaggaagccggggagaatgtagagcgcctaactcccattccagtgctcctcttcccaccagtagccagcctggacataggagaggagccaggcccaggcttcagctcagtcccttacttgctgtgtgtcctcaggcaagtcacttcccctctctgtgcccagttttattttttcatctacaataaggtagagttgtaagaattccctgacatcctcctacaaactacatcaaactaaatgtagcttgtgagagctattttgcacgattttgtaaagaattaaagtaatgatgttattattaatgtattaatatctaggtattaattataatgaaatgattatcatccttaataattctgttttattattaatattagtgataattattaataacctacataaaaggatagcataagctttaaactaggataaaagttctaggacaagctgggagtggtggcttatgcctgcaatcccagcactttgggaggtcaaggcgagtgcatcacctgaggtcaggagttcaaggccagcctggccaacacggcaaaaccctgtctctactaaaaatacaaaaattagcagggcatgctggcagacacctgtaaccccagctacttgggaggctgaggcaggagaatcgcttgaacctgggagggggaggctgcagtgagccaaaattgtgccactgcactctagcctgggcaacagagtaagaatctctctcaaaaaaaaaaaaaaaagttctaggacaagaacactgacttctcttgttcaaaccatcttgttcataaacctacctgtggcatgaccagactcggaaagtgagggcatttcctgaaggagccaactcctcatgccagggatcttctgaggtgcctatgtctgcagcattgggagcagctgagactcaggggttcagcaaagggctaaggtgaattctcctgaaccctgcaggtctcactgaggacaggctggtgccagatcctgtaactgggagagccttctgccagcctctgaccatggagttaaacctgggaggggcgcagttgtccaagatccattttggggatttaaaaatttctgtaatttcatgaactcttccaggaacaagtgacataaatatttttctctttcttcctctcttttaaaaagtgctgcttgtgctttgtccccaccttcttcctctctacgcatttgggttttcaggaaaagctgacctctcatgacctgcagaaaatttcttttccattatcccatgaattttgcatcatgtgacattgtcactgagcaatgacccctagtatagccttcacggtgcctttgctttggctgacactggctccttagacggccgttcaccccgccctgggtctggggtgggatgtcaggaaactaggtcttcttggcacccccaagctgcctgggcatcaacctttcagactcctcagatttagggctcaaggaatggcccagacatcagtgtctgatgatcaaacaagccaacagcgggagggaaaatgatcctttcatagaagcaaacctgtcagtgggatggggccggcccctgagctcaggacgctggggcttttgctgtgtgccgtgggcaagaggctccctctgcatgcctggttccctcctccggaaagtaggagagcggcagtacccaccccatggggtggacgagtggcttccctggagcacgcgagtatccagccagcagagccctgtgtgagaaagtgccctgtgtgtgtgtggcctggaaacccccaagtggtctagtctcctgtggattatggaccctcctgcagcccctaaggcagtcacgcttcttatgaatgttgttccactttacagactggggaaaggtcagggggcgggccttgtcaaggtcacacagctggagagctggcagctggatttcaacccaagtccctgacccaattccacagcccttgattttaagcaaacacacatcctctctgtggcaccatcactatccaagaaatagcagagtcaggcggggctagttggacgccctctgatctatttatttttcagcgtctgcttcataaacccttggacatccacctgaattttccttattgctgttaacctcatcttccaattacgcaaaatgtttcaaccaattagccccttgttgcaggagtctcatctttggctgacatttggtgctgtgtgtcttggtcctgactgacaaaggcagcacagcaactgctcatgtcagcctcgttttctccaaagggaaaagggctccatgactagtcgggcatctgggggacccaggagctccagtagctgctgagcaggcaaagaaaggctgattaaaacccacacaccaaggccgggctcagtggctcacgcctgtaattctagcactttgggaggctgaagtgtggatttcctgagctcaggagttcaagaacaacctgggcaacatggtgaaaccccatctctactaaatacaaaaaattagctgggcgtggtgggacccacttgtagttccagctactcgggaagctgaggcacgagaattgcttgaacccgggaggtggaggttgcagtgagccgagatcatgccactgcactccagtctgggtaacagagtgaaactccatctcgaaacaaaacaacaacaaaaagcacatgccaaggtggaaactatgtttcatggtttctttaaaaagcacaaagattgggaggtgctaacgacacagtctgataaaactctgtggttttggtgttttctgtatatagacaccctgaggttcacatgtcgcctttcccttggcatttaaggctccaaggaaccctctgttttgcttggtttcccaattaacccctcattcattcattcattcattcaagaggttactgagtgtctgcaatgtgccaggcactgttcttcactcaaagtctaaagcaggggatccaaaaccaaggttctgatgctatggagctcatgctccggtcaaggacaatcaataaaaagacaaaatgtggccgggcacggtggctcatgcctgtaatcccagcactttgggaggccgagatgggtggatcatgaggtcaggagatcaagaccatcctgctaacatagtgaaaccccgtctctactaaaaatacaaaaaaattaactgggcatggtggcgggcgcctgtagtcccagctactcgggaggctgaggcaggagaatggcctgaatccgggaggcggagcttgcagtgagccgagatcacgccactgcactccagcctgggcgactgagcgagactccgtctcaaaaaaaaaaaaaaaaaaaaaagacagaatgtgtcttgtgtgtaccaggaggaggctgatgctgagtgggaaaatgaagccaggaaggggggttgggtggaagtggggatcctcagagaaagctgtcatggagcagagacctgaaggccacaaaggtgggagacaggctaatatcttggggaaaggcagagggaacagcaagtgcaaaggccctggggcaggagcatgttccagcagcagtgagggaccagtatggccacagcagagtggagggagatgcatggacagagaagccagagaggcagggaggccagacacccacaaagcctcatgggccgctgtgaggatctgggttttatcttagtgactccggaggactttgagggattttgaacagagggaagaaatattattttctttgatattcattttctattgctgtgtaatacatgaccacaatcttagtagctgaacatgacacaggtttattactgtgtggtttctgggggtaaaggagtcaagcatgttagagctggctctctgctcaggtccccacaagcctgaaatccacatgttagttggttgcgtcctcatctaggggctccacttgggaaagatccacttccaaactcccccgggttgttggacagaatcagtttcccttggcgctgaagggccaaagaccctgtgtctttctagctgtcagctcatcaccacactcagcctctggctgttgctcccaggccctcgacacatggtcccctccatcgttccttcccaaagaactcagcttctttcaataatttgcttgattaggtcaggtccatccagactctttcacctttgatcaactcaaagtcagtcggttagcaacctaatccatggcacgatatcccatcagattttgtttctgcccagactctaaaggagggaaggagcaatcatggggccatcttggaatcttgcctgtgacttgtagttagaaagatttttctgaccattgtgctcagaataggataggggagcagctggggcaagtgcagactctgggaaatcagagaggagacggtttccttttcaatagtgatggaccatggcagtagcagttgtgacgacagaagtgtttgaagcgtggttgaagtggttgtaaaatggatgggatgtttttgtaaaatggtttgaaggagaacaataaaacccatacaggttgactccaagctttctggtctgatcaccctgaatgctgagctgtgggagtgtattgtgtttatcgagaagtgtgcagattgccaaaggattcgctttgtgtttacagagttaaaggtagacaggtgctccgggtttgtgatttttaaaaaataaaaataataatacagtatctatacagatgagacttgtcgtcccgttaggatcccaatttgtgactttcctcttttaagagaataatacagaaaagcaaatgagatctgcaatttgatcagcatttgttttttcagctgctggttcctgaaaaaaaattgtagcacgcgagaatcagcgacaataatttgtggaagaattacaaataggccaggagttggctggctttactggttttgacttgaattagatgtaagacagatgagtcgaatgaggtctgttttgcagcagaaagtattgcaatgtcacaaggggccataaaggtgcctaaactgagcagaaacatatgttcttcagaaattagctgttaggtacgagcctttctcttgttgatgctatcggtatgaaatccaatattatcccagggaaaggaaataaggccacttagctgttggatgacaagctgtcttacactccatcaaacccacccgtttacttgtcacacggcttgtaccgctcaggaagataagagacgtcgtatctctgcttttcctcatggtgtgttttggaatagatgccagcttgatgtgttgaccacggtatgcggggccattcaataaagacagatccttggccaaatgttctgtatttttccaaatacaaaagacaaactaataaaatcaatgcagccatgctgaacaccagcacagagggctccctcctgcgctgccacgtgcttcccaccagggaaatggatcagacgcagccacgtggcccgtgctacctgatgtctttggaaaattatgcttttgttttaattttagaataaaagttgttgagaagtcactctggcaatcccctgcccaccaagaacaggcgctatcaagagtggatattgcagaaacgcttcctctccctacaaaccttccagggtaagcatggagggagaggctaagccttctcttcattcccttgccactgtcttcttgacccaaagatgaggggcttccatctctaaatctcccaggcaaaaattctaatagctgagagacagaaagcagctcaaatattaaaccacagatggcctgccatttttgtttgaagggctggaattttcagttaatgctgggggaagtaagaaagtcaactcagttgctctgtccagtaattcaccattgctgggctttactgaacaaaggcaaactctgacgacatgatcatgattgaaagaggcagctgagcaggtgagctcctcctgtggctccctctcagcatcttgtgctgccattgtgtgtttaggtattcatgtctctgactaagacagtgagctcctcgaggaaggtacttgtgcctcgatcatcctagaaccctccacgcccagtacgcacagggccagcacctagcagacattcagtgtgtatgtaagcctctgtcctggtctgaacaggggagtgcccgtgtgagcctgtttgctgccttaattattaatagcattcccgtatgacccaacctatcactaaacctcagtgttgctccctacctaagcagaggaacttcattgcaagaatattgagtggcttaatgacgaggtaatttcttgcctcgtatgatgaaaaaaagtcaaccaggaactggctgagcacacctggtttgcacaaggtggtcctcgtcagtgctggttgttttgctgtaattgtgaatggtgctgcctttcgcacttaacacatgtcctgagttggcgagtaagttatctggtcatctttggcatcatcatcaggcatagcaaatccagcggtcatcagggcatcttagagttggcttagctcttggggaccaaagggatgtaaaaattgccccaggatgtattttactaaggttgtcaaacgatgagttagggtcggctggttttctagtagctttcaaaaagcccgagattaactcagatggaatcagcttaggtcacgtgcccacctgtgataagttcttgttgccggggcaacgctggtgctgataggtttaacctggatcataggtcccagcccctgactctgggatgtttttctctccacactacattggctgggtaggggtggggagagttttctaaatgaaaatcaagttgctgccataaactcccctcactaaaaggcatgtccttttgacatggagatttttgtccattttgttcaatgctgtattttgagcatctagaatgataacactcaacagtggaagctccttaaatatctgttgaatgaataaatactgagaagacaaatagaaagttttcctgaggcagccttctgtataaaataggatacactttattgctccagatgctccgtgaagcagtaacaaactgcaggtaggcaagacaacctccctcaagagaatcatcctttggtgttgaaaaacatattggaaatcactgacggtggcctatacaggtctctcgtatgctgacggtacaaactctccacacatttcaagcactgggcttggtctgccatgttgacagaatcacgatgcctgcctcacagcaagggcagctccctcccacagtgaaactgagctccagaggaagtagggtttccacaagtcagttcagttctctcctttcaatgttgtattcatctgctttatatttctgtaaaggaatacccgagactgagtaatttatgcagagaagaggtttatttggctcgcagttttgcagactgtacaagaaacacaagaagcgtggcaccagcatctgcttctgatgaggcctcaggaagcttttactcatggcagaaggtgaaggggagtctgggtgtcacatggtgagagagggagcaagagagcaggggttggggaggttccagactctttttaacaaccagatcacaagagaactcattaccatggtaggacaccaagccatttcatgagcgattcacctctgtgatccaaacagctcccaccaggccccacttccaacactggggatcacattttaccatgagatttggagggaacaaacatccaaatcctatcaggtgtgaaatgcacatgataggagcattttctcattgagttcatgtggataaactcgggtccatcctgcaagtgttttgaaatcatttacagaagttcctcaagggcaggaattacatcctctgttcctggcatgatgcctggtagccaaaaggggctgtaaactgtgactttggggctgagaaggtgaattcccctacctgggatttgtcagtctctcaaaagagtcatgctgtggtcccatcccatggtaaagactgaacatattggatgggagagaggggtagacagggtgggagttgctggtattggatcttctgccatgccaaccacctcccttccttggcacatttctccagctgctgcattcaccagccaggatcctttggctgcaagcaatggaagctggctttggtcagccttaccaaaacatggatctgtggacagatgtggggtagctcggagaacacagaagggctaagggaccaggtgacagaaggactagacctgggtcaagtctgagaaatctctttgaggcatacattttggggtgagggcctactcactcttgtttcttgtctcagtcccctcaaggtaaaatttcccaggagggaagtgtgggcttgggccccacgctcactctctggcagagcaccttggtcatccattcctgagatggtgaccaagtgggcatgggatcctcgaggggaacttgaagtccagggcagaagagtggggaatgggcactggccggtctacagcaccagaggcctgccccagcccatgtgcacaagcaacacatcctgggattcttacagcctgggatatgtatggcacttactaggcattattattatcattattattgttattatttgagatgaagtctcactctgtcacccaggctatagtgcagtggctcgatctcggctccctacaacctctgcctcctgggttcaagcaattctcgtgcttcagcctcctaagtagctgggattacaggcatgtgccaccatgtctggctaatttttgtatttttagtggagattgggtttcatcatgttgcccaggctggtctcaaactcctggcctcaagtgatccacccgcctcagtgtcccaaagtgccggcattacaggcgtgagccaccacgcctggcccacctagtaggtttttaagaaacgttgaggctgcctaacttacttgtacctctgacctccaaacttaaggcagaactgcttcctcctcccttccatcccacagcactttgttattatttttaacaactccattattgaactttgtaagaattaacttcaggtttttgtttctttgggttagaattatgtctaatttacttttgtctacatgagttcttgacacagaatggaagcccaatcaacatttgctggataaatgagtgattgaacaggtgttaagtgggaaaaagcccaagtcaaaccaatatatttatctttgaggtatgggggaaaagctcatatatgtttaaaaaatattcaaaacttgaaaataaggtataaagatgattgagacacatagtgtcagggtgtagggcagtctaacaagtccatgtggggggacctgagtccctcatgagatgtgactttgtttgacttcctagttaccattgttagggcccagacattttataattctggaaagttagaggttaagatataggaaacttataaagtagaatgtgtttcttttctgatggcactaaagataatccccaaattataacattattgaccattaagatattgaagtgattgtagccaactcagcaattgaatggcagaatttcttctttttgattgactgcatggaatccttgttcttataccctattttgaatcaactttgccatcctattagttccattattaatgaaacagatttgacaaatgcttaccatccagctcatgagaattatgcttttaacatttgagaatcatactttgatacacacacacatatttggaaaactagacactgtttcttctaaaatggaatggtttttattactttagaattacaagttcatgccaaaaacacctttttctggaataacatctggaatttgtatcgtgacttttctctaccgatcattagctcccttctttgtgtttcttaaccaggcagttggaaatttgaatctgctttttcttcttcttcttcttatgctcctttgccaatttttagcctggaaatgggaagtgatgttactgtggtcaagagctgagctacaatacctgtgccaatacctgtgctgggagaatgactgataatggcattggtcatgatttgtgggtttccagaaccttttgaaaactcttacatgtcagggaaattttttcctgatgtgtctgcacatccccaaaagaaaagccagaagtctacgttcccatctgccttacagctagagagcagacatgtgacatggagtgcactgatcagaggggtacgaactagactctcgttaagaagagaaggttgtgtaaaagacggcagcgtgcagagaccattctgcagagggtactgaagagacatatggggcttgcagaaggtacagagcagtggggaggcagaggtgggtggctgtcacactgtcccctattgtctgtgtcagtgatatgcccagcaccaccagtagctgtgggtctgccttgtttctgttatatagcctccaagcctgattctctggccttgcagagcttctgggagtcactgaatacattcctttttggcttaaactagttagagtagattctgctatttgcaactcatagccaagtctgatccacatcattaataatggaggcatggggacctcagagatgcttgaatcagagacagctgggtagaggcacaggaaggtcaccctcctgaatgtgtcctagaatatctatagtttttcatgagactgagaaaagctttggattgccaccagattactttgcggacaactcttgcaaatgttcaccctactacataaacaatatctcagctggaatttttcttgaagttctatcaagctctttgatgtcctgattctatggtgtctcttaataatgtacacaattgaaagttatctgaagattgatttacatccttttggaaaaataacagtgaaatctccagggtgtaacatacccaccaactgccttgccagcagggataacaaattaaactatacattcaaaaatttgatgatcaggaaattactcctgggatgagctttatgattattgacttcaaagaagtatttgatggtacagtgaaatgaaaatgatatattataatttagtgttttccatgcaaatggaaaagtagcagaaatatctatcatttcagttcaaggaagggcccccctggaaagagaagagatataggcactgtcacatcaggaggtggtttgttatgggtggttgaaaaataggcatgaagtttcttgagacttgttttggctacaagttctacaagttacagagacccctagcccctctccaataggggtttatttttcctcatgttaaataagtctagaggcaggtagtccagggatggaatggtagctccatgataacatctgggacccatgccctttctggatttccatgaccctatctttgttgtgagccctgtcttcatgctctcaaaacggctgccacagttccagccaacatgacagacaatagtaacagacacctgcctgctgagtcagctccttttaaagcgttttcccggaagtcctgcccagtagcttatgttgagtaatcatttgctgggtctgtgtcatgtgaacatttgattcaagagagcctgggaaattttgtttagctgggaatacaatctcttcaattaacatcagggttcagttaataaggaagaaggaagggaaatctggagcctctgatgcacccgagtgtctcttttcatagagtttgctctaagacctggcagtgcttttgacttctccctttcctctttgccagtgcttcctctgtcttctttgttaaaaaaaaaattatcgttcaacctccatcaaagacaaaaagcagcatgatattgtttggctctgtctccacccatatgtcatctgcatttgtaaactccctgtgtcaatggagggaggtgattggatcatggggatggttccccatgccgttctcttgatagtgagggagttctcttgagatctgatgggtttataagacagttttccatgctcttgcttgctgtctctcgcctgccgccttgtgaagaaggtgcctgcttcgctttctgccatgattgtaagtttcctgaggcctccccagccatgcagaactgtgagtcaattaaatctcctttgtgtataaattacccagtcttgtgtagtatctttatagcagtgtgaaaacagactaatacatggcacaatctatttctttcttactgcacttcttcttcctcctattccttaaatgattagatcaaataggatctgtggctgggcacactagctcatgcctgtagtcccagtgctttaggaggctgaagtgggaggatcactggagcccaggagtttgagaccagactggacaacatagcaagaccccatcttgaaaaaagtaaaatgaaataagaattactaaaaaaaattagccaggcctcgtggtgcatgcctatagtcccagctattcaggaggctaatgtaggaggatcccttgaacctgggaggtcaaggttgcagtgagccataatcatccactacactccagtctgggtgacagggcaagacctgtatctaataataataataataattaatattattattatatttaaataaaaaataagtaaataggatctgggttatggagaccccatagtctcctctctaagagagagccgaacaataataaatattgcagaaggatttgaaacttcagagctcccgaaaaaagatgagcctcataaatcaagcaccttcctttttcaaaaattgcatttacatattttctgaaatgtgacttttttacatatgtatttaattatataaataaacatttttagtcacctggattgaaccaaacattctaatgaactatgctaattggctggaatgccaacaaaatcaaaattaatgttaaattttacttttaaaaaaaacctcagggaatcagcttgctcaaggatggaatatgtatattttctttaaagcttcaactttaataaagtaggatcatccaaagagcttctgatccaggagatcaattttagagcccaaagccaaatttaatccacataagatttttaaaaataattttatttgtaaaatgatcctatggtaaaatggacctcttgtgggcatataggcctatagattataacacatgtgttgattggcctctccgccaccaaaatcacgatgcaaaacagctgcattaccctcacaatttcttcatgtggccccttggtaggcaatcttctctccccagctgttggcaaccactaatctgatccctaatccctatagttttcatttcgaaaatgtcattataaatggagtcataagtctgtgacttgttaaacttgattttctttcttttttacaaacattatttattatttattagttttattttctagcttttcttgcttagcataatgtctgtgagattcattcaggtcatggtgtgtatcttagtgtgtttatttttgttgttgaataatagctcataatatagatacaccacagttctgtttgtttttttattcattcactaattgatggaggtttgggctgtttccacttcttggctattatgaataatgctgctgtaacattcatagacacatatttatttggacatatgtttttatttctcttggcttgaaatggcaggatagggggtggtctcctggaaaatatatggggaatattttgttactaaaaataatgtttgtgtgtgtgtgtgtgtgtatgtgggccaaaatcaacacttgtctactacactgagccaagttttttttttaaataaaatgaaattgattttggtgttttatacttgcagtttgccaacctttttacatatcttcacagctcattactttttttgagacagggtcttgctctgtcgcccaggctgtagtgcagtggtgcaatcagggctcactgcagattcaacctcttgggctcaggtaattctcctgcctcagcctcctgagtagttggaactacaggcaggcactaccacgcccagctaatttttgtattattttgtagagatgaggttttgccatgttatccaggctggacttgaactcctgggctcaagtggtcaatccaccttgacctctccaaaatgctgggattacaggtgtgagccaccacacccagcccacatctcatcctttataggaataaaagcagctggagccttttgatttcggtagctgtgggtgcaacatgttgtccagcctcttgttacaacatacttttctcctctcacttcttaatagatttaagatactcacaatggaggtgacaataattattgagctcaggtaatcccaaatagcatcaccacccaagtcccacaggttcactcccacctgtcaccagactacagttgacccttgaacaatgtgggcattaggggcatggatgacccccacacagtcaatctgtgtagaactctgacttcccccagactaaactattaatagcctcctgctgaccagaagcttgactgatgacatgtacaattgattaacacatattttgtatgttatatgtattatatactatattcttacaataaagtaagctggagaaaaaatgttatgaagaaaatcataagaaagagaaaatatatttactattcattaagtggaggtggatcattatgaaggtctccatccttgtcatcttcatgttgagtaggctgaggaacaggaggaagaggtggagctgtttcaggggtggcagaagtggaagaactgtgtataattggagccatgcagttaaaatctgtgttgtttaaggatcaactttatttctgtttctgagttgaatctcctttgacataaccattaaagcgtttttctccaatgtctgcacttttaaattctcctttctttttcatcagattcagtattggagcagcaattcctgatgtgctgaagtcaacagctatctcatctaacaattctgtttcttttgcctggaggaagttgagaactgataatctttgggatgtaggtttagaagaagtcatgagcctctaatgtgtccagatatgggatattgtggtggaagatgttgagcatatcaatcaggatggacaaggttaggttgcagtaacaaataagacccaaatctctagggccaaacacaacaaatgttttaaaacccacttacactttatatccaatgtgggttctttgtggagggctcccttcatcatagtcattccgtgatccagtctgctggaggctgtaccgtctcaatgcatgctcccaagactaccacagcataaaaacagcatagccaatcacactgcagttcttaaatgcttctccttagaactagcacctgttagcagctcagtggaacttcctggttggatgtgccaggcaggtgagtgccctggttccatggagagggcacagaagcttcatgttgtagaccctctgagaccttgtgctgtaagtctcttcatttggctggtcctgatctgtatcctgaatgataaaattgtaatcataaggaaatagcacctgttgctttctctcagatttcaatggctgagagaggtcacatgcctattcatgactttaaggggttagaggagggtatgtgtcctgtgggcctggaagaagtaggaggctagggttatttgtgagttctagcaatgtctaccaagaaggagaatgggatgtggacaggcaagaattgacttcaaaaacaacttgactcatgtcatggttctctctctgactctttgaatctcagcacattattagtttccatgttaatggattgaggttgggctttttttgttttctgcaatgtctctttataatcttatttttgccttacaaaggcattagcatacattttctgggctcccagccagatgaatcattttcttttctgtttccccatctccatagtgccctggtctttgccagaaccaaacagtggtcacagctaggacctgcaccgggggtcctgaatccaccttgcccggtgcccagatgcccctcctgctctctggatggagcccaccctcaacaagcactccggcaggaccaggttccatgaagacaatgccacttggaatctgataagtaatatttggtaccaagcccagatcagcttttcatcaccctagacaagagatgtgtttgggactcttcagtctcccctgaagccctcaggcaggtctctgtcatgctgggtgggattatggtaacactctaccagcagctccccacctgcacctcaggccaggttggagagggtgaaaaagcaacataaaaatgtcaggttcctattggggattaggagacagtcaactctagccaagttttatttttccattctaaaggaagaagaagaaaaaaacacaacctaaattatcccattttccttaacacaccatagatgcgtgaattagaagaaaaaatttgttaaacacccaaacaaaaagaaacaatctggccaccagccaggattactttgcctggagcgttttccatgactctaaggccagcacacaaaagggtttctaagatccatttctggtgagaataaaagctgaatctgaaaaacagatgccccctgaaagtaagaaacagaagaaaatgcaatctgtcaactagccacaatttattctatcaactatcaaaaatttagtctgacatatttgctgggtaaaataaccatgttgactgattgttctcctgaaaaagacagtttgaattcacccaactccagctgagactcaaatagtcattttcaactatttccaaatattaatattttctgcaaagagaaccttttataaaatctcaatttgtaaaactggctagaaacccagttgctctggttgaaactgggggtgggtgctccatgtgatacattaaatatattacaccccctgaaaccctcccctcaatccaggagcctctctctctctctctctcctgctctctctctgtcactcaggccggagtgcagtggagcgatcacagctcactgcaccctcaacctccagggctcaggtgatcctcccacctcagtctcctgagtagctgggaccacaggtacacgccaccatgtctggctaattttttgatttcttgtaaagacagtctcactatgttgcccaggctggtctccaactcctggagttaagcaatcctcccacctcagcttcccaaagtgctaagattgcaggtgtgagccaccacaccggcctgaacaaaattcacatattttaagaatctttgatgtagacgggggacagttctgctaatttaaaaacatctagagttttgcattgtcacaataactcatggtgggtgtcatttctagaatttagtgtaagggttcagggatggtaatgtatgacacacaatcctgtccaaatggccaagtagcccccaggagaaaaaaacaaaataaaactggacagaaggctttagctgtctttacgaggcgggagctaagggtcacccccaatgtggcccgctacagccccagccccctatctctgtcttgcatggtgcttgcttctcttcctctagagcccaaatataccaaatgcttcttgctcagcctcctttgcatccagaagcagccatgggacccaaacctgaccaatgcaacgagagagtcaatattctgaggtgggaagagttcaaggaaaaattttgtttcgtaatgcaacggaggcacaagaagaaactctccttcctgcctttgaaaataattggttgagaacaacatgctggaaccgaagcagcctttctgtgagcatgaggagccatgcttaagaacaagtcaatctgctaaggaaggcagagcagagagacagatatggttgagctgcattcttcatcccctctgttataggggacaatctatatgattcttcaagtctgttaatcaagtctttggttgctgacagccacacgcattttaatagatatacttttctcacttccattcatctggaagcagaaagaacagctctgagggaatcttctttgcagacgctgacacttcgattctcactgtggtttttcttgttgacttagggccacataaatctttccctccttcttggtacttgatcttctgcctctgccgcaggcttgttatctgttttctgtaagtaacgcaggagcttctggttataaacgacttgctaaacttgaattcttaagagtcgtttatctgttagacccaccctaacccaatcaatactcagtgataggaggtgtcatcaatgattgactttaagataaagcagttcttcccctgcccctgctaatttttgtatttttttggtagagacggggttttgccatgttggccaggctggtctcaaactcctgagctcaggtgatctgcccgcctctgcctcccaacgtgctgggattacaggtgtgagccactgcgcccggcttcgaatccattttccaaacacatgtaggtgagtatggaaatagatgaaaggatatgggtcactttacaagataacagcctggaagaggtcattgtgggttacatgcatttgaattcgctgcaatataagctaagaaaacaataaacttttctcacataggagactgggtattacgaagagctgttctttagtccttgcacctttatcactttattttagaaacaaaactcccatcttcaccattttcatttgaaaaatctcccctctatatttcaatctatatgagctgcagtcagaactctagcccaagacccagagctaaaccagtcagcatgtagtttttccagagctaaaccaatcagcatgtagcttttccagaggtaagcccaatcagcatgtagcttttccagagctaagctaatcagcatgcagcttttccagagctaagccaatcagtatgtagcttttctagagctaagctaatcaccacgtggtgtgctctggcaacagcaatttatcaggggtgagtgagcacatgacctaatggtgacccaatcagaatgagtctccggacttccctggaaacttgtggcccttttctgcaggattgaaacttggatgatgaggctgtgccataacttgctactagagctgcagaatgaagctaacacagctgagggtagagtcaaggcatcagggaaactgagtcaagttgaattgagtccagaatctactgtccctgaaaccagtacaatacttagatattttgttattttgttttgggagaaaacaaattcccttcttactgaaacaagtctggtctgcattttctgttgctggctaccgaaggaaggggtcctaactaatatcctggggtagaacagtgcccagttatagaggccccagtttccccattactcatgaagagacagttgctctaaggagcttcagcatctactgccagcatcaccgttctggtgctctggttctgggcgattcttccataacttgtctgagcatgtgaactttggaacagactgcctgagttcaagtctcagcatcaccaccactaactttatcaagccctccatgtctcagttgtcttactgtaaaatggaaatgactttcataaacattaaaattgctgtgaaatgtgaatgtgttaatatgcagacagtgattagcatagtgcctggcacatagcaagcccatcatccatggctgccctcattgttgttatgttcttctttatattgaggatccatccagaacctcccttcattctgctggttgcctccattctcttgtgcctcacttggccagttctccatcttaggagctttgaattcctttcctcagttcaaacgttcctggtttgtgtcccaaccctaataggacttctctttccaaggtcacaggtacctaatctgagatgtcaacccaggtagtaagttagtggtttcatctttagacagggatagtgaaactttgcttctgtgcatctcattcttgtttataaatctctttaaagaatacgaactttgtagtatatttatttttggctacccagaatctattgtaccatctttgggtaactgaattccagtttcccctgggtaaccaccctccaatggctggaccaaccctctgtgtcaggtggactaaaaccatcaggctctttttttccacagctctgactggtccagggatgagtatgtgacacttaagtccaacgagatgcaatgagacttttgttgtggcttctgggagtgccagaggctcttttctaccaggcttagtcagccttgcagccacagcaggagatgctaagaaccgccctgagagggaaaaagaggagcagagggatcaagagacactcatcaggaactgctgacatttgagcctctggatctggctgtgcctgaaactaacaagctactccttccacattctagttatctgatattataaatttatttcatttaaagctatttaacttaggttttgttgttgttgcatgcaaccaagagtgctgactgatacaatcttccaattatatgctgtttttactttaaaaggggtgtttggtgtctcagcctgaaaggagcagtaatggtaggattgagggcacatagcaatccaggaagaaggcaatggtacatagacccctgaaatcataccagatggccagttactactcagtctctagattcagctggttctgcaagaagagttatcaagctatcagctttctcttgcaggcatccttctgtacctttaagacagagcatctaattagctttgggtggtttcagttaggcgtatagtggagaaattaagaaaacattaaaaccaggaccattggaacatgaggatgtgcggcttaagatttacccaagaggggctgacctcaattaggacgttgatgctggattgggtgctctggttttcctctactttaaaaactgttggatccctgatatgccaagaccccagagagatggagaaacgtttacgtgcatggaggaaaaaatatctttttagagttacaaagtgagaatcacagttattctaccactattaagccagaaaatcattgtctaaaatggatatttttttcttttttaatgtgtaaatgagcttcttggttggtttaaaggggcaaagattcccatcagccttcagagctggtcactcatcagtggattggtaaatgcagaatggggttcgagtctgtatcttctttagtggaacagtgggtaatgtcgttttgactcacgaatcagtttccttcactcttctgggctaatgacccacttcctccggcttcccttagctgcacctggtgtttctgtgggaaaggccttcacactgacattcttatttgatagtgaatgttgatggacaccaggcctgcttatgcacaagagcttctgacctgggatcagagaaggaaacggaattttaaagaaatgtctcaagagtcagagaaggcaggagccgagaagtgatcactactgacctcaagctcaaagacctatgggaagtagcaaaattcaacaggatgagtggtgaatccctgggtccttggtcaaaggtcctgaggtcctgaggtcaaatcagaagagaaaatgcaaatttgtccatgtaagaaatttattccaaaaagtcagatacaaaaatttgacttgacaaagcatggtgggttttgtaaaaaaaaataaatggttataaagaggagctgaatgtggaataactttgcatttcacagagttaacatttgaagtttcagctgtttgcaaatgactcatggtgctactcagcgtgggtgaggttgtgctgcagtaacaaataagaccaaatatatcagtggtttaaataagaaggctgcattgccaccacagggtcagctgagacttctgtacattggggcccacctcacagcacctccctcttggcacatccttctacaatcactgtggcaggaggaagataacatggcttcataaagattggcttttaaaatatttgcccaagagcaacactaccattttatcccacatgtcctaggcaaagtcagtcatatggctgcacctgccttccaagattgtgggaaagtgcttggagggacgggggaatatttagtgagcagtagtcatgaccaccatactccatggtatgcagaaatgtggagcagggctggtgggtggacccactccacttggctgctgagcagggctggcccactactcagaatgtgggtgccagggaagcctgggcttctctctcatctgctttgtatatttctcatgatttgattcaaatgcagattctttgtgaaaaattagccctgatgagaaagccagttcctgatcatggaagtaaagggcaaaggaaaaaaattagagggtaaaatacaaaggacaaaaatgacaaggttgtgtaaatgacaagagtactgtaaatattgatactttgcaataaaactgtgcatcgtccttttgagagatgacaacatgctagcagccctcactcgctctccatgcctacttggcctcagcgtccagtctggccacacttaaggaggccttcagcccaccgctgcactgtgggagccccgctctgggctggccaaggccggagttggctccctctgcttgcggggaggtgtggagggagaggcgcaggtgggaaccagggctgtgtggggcgcttgtgggcaagcgtgagttccgggtgggagcgggctcggcaaacccattccagggtgccctgcccttcacaaagaaaactctccctggggctcccatgggcttctctgggatcagtcacgggctccgtgggccctacactaggagtggccagccagagccgcaggccctgggcagtgaagggattagcacccaggccagcagctgtggagggtgcaccgggtcccccagcactgctgcctggcccacgctgctcttgaattcttgctgggcctcagccacctccccgtggggcagggctcgggacttgcagcccgctgtgctcaagagccagccccccggcatgggcttctgaaggaggccacccccggctccacggcgctgggtcccatcaacctagggctgaggagtgcgggcatgccgctgcgggactggtgggcagctctgccctcgtccctggcttgggatccactaggcgaagccagctgggctcctgagtcaggtggggagttggagaacgtttatgtctagctggagtattgtaaatgcaccaatcagcactttgtgtctagctcaaggtttgtaaatgcaccaatcagcactctgtgtctagctcaaggtttgtaaatacaccaatcagcaccctatgtctacctcaaggtttatacatgcaccaatcagtgctctgtgtctagctaatctagtggggacttggagaacttttgtgtctagctaaaggattgtaaacggaccaataagctctctgtaaaatggaccaatcagctctctgtaaaatggaccaatcagctctctgtaaaatgaaccaatcagcaggatgtgggtggggtcagataagggaataaaagcaggctgccagcgccagcagtggcaaccagctggcgttccctttggagctgtggaagctttgttctttcgctctttgcaataaagcttgctgctgctcactctttgggtgggtgtgccttaatgagctgtaacactcatggcgaaggtctgcagctttactcctgaggccagcgagaccacaaacccaccgggagggacgaacaactctggacgcaccacctttatgagctgtgacactcactgcgaaggtctgcagcttcactcatgaggacagtgagaccacgaacccaccagaaggaatgaacagctccagacgcaccaccattagaactgtaacactcatcttaagggtccacggctattcttgaagtcagcaagaccaagaacacacccattctggacacactttcaaatgcatccaatggaagctaaatatcatagttgattaatatgcatgatctttaaaatatattaacaagcttttcttaatagttagaaatgcgtatcatttcctttcctccttctacttcctccggataattttatcttatttcaatttattttgatgctatcaattgctttacttttaaatatactatgtttacaatttaatcagaactgagttatcattggtgttatttgtaacacccaagtgatcaaaacaacacaaacacacagtaaattttgataaataattattaagcatcgaagcaatattttattaaaagtaaagtctttaggagatggatggagggggttgtggagtcttaattaaaggacacttgtcccagaccccactcttaacaagctttccccttgtagaatgtggggtggggggatttgcatgcctaaagcaaagcattctggaaaggctctagataagtgaagatggtacttttttttctaaaagggaaaagggtgattatgaaagggtagatgggaaagaacagcaagagtgttctcagggtgagtactgcagggcatgagaacacactgagtttgcggtccatacccagatacccttgcatggtgtttgtgtgcccctcgggaatgaggtgatctgaattcaaaaaccttttctctgctctctgacttactggcctggcattccatcccctactggcactggaatcactagtattttgtaatgagcactgggtcctctccatagcattgctcacacaccatcgtgtctgtccctgagaatgcgtcaagctgctcagggcaactagtctcgaccaccaccccaccatgttgtagaggcagaggtgtgttttcatttgctcatggacacccatgcactattccttccctaggcctcccttctctccatgactccacctcctcaccaccgcccccttctttccctcctcctttttccttctactcccctccttccattcccctcctccttagccagtcttacttctccttgaaatcattatcacagaatgaaggcttggatgttgtttgcatacaactattacaaagagacccaaagtgacatttctttatgggcctgggttccagcctgtgacaaacagagctgatatcagagaaaacaaattgttaatgttatattggaatttcactgtgggcactagatatttgcaagaggtaaccaaatgtacaaggggtcgaagcagatgaattccattccaaaaccactaagactaaaaagcagctgcaaatgaggtttgaaatggacatccttctccttagagacttcacagtgacaaatggattagtcccaaagtggaacacaaacctgctttgctttcatagaagcgaagaagactaataaaggccgtgtctctatccagccctgaatccaccagggctccgtcaacctctatttaatagcccgatgcttctcagctgagcttcttaattaagtcaccgtgagagctggcccttaagaaactcttaaacacgccgggcgcagtggttcatgcctgtaatcctagcactttggaaggcggaggcgggtggatcacttgaggtccggagtttgaaaccagcctgaccaacatgctgaagccctgtctctactaaaaatacaaaaaaattagccaagtgtgttggcgggcacctgtaatcctagctactcaggaggcggaggtgcgagaattgcttgaacccgggaggtggaggttgcagtgagccgagattgtgccactgcactccatcctgggcgacagagtgagattctgcctcaaaaaaaaaaaaaaaaaaaagtaatcccagcactttgcaaggccgaggtgggtggatcacgaggtcagaagttcaagaccagcctgggcaagatggtgaaaccccgtctctaataaaaatacaaaaaaattagctgggcatggtggcgggtgcctgtaattccagctacttgggaggctgaggcagagaattgcttgaacctgggaggtggaagttgcagtgagccgagatcatgccactgcactccagcctgggcaacagagcaagacttcgtctcaaaaaaaaaaaaaaaaaagaaaagaaaaagaaaaaagaaacccttaaacattgagtcctatttattaattaatgtttagccttccttagtgtaaaaatgtgtttactgagtctattattatttattatattttaattaatagtgtttccaaggcatgacttggaaagagaagctttagtccactcataaccccaggcagtgctctctctatatgctgccatgcagggtactaagaaaaatatacaagcaaagttatgtaataaaatctctaggaaactgttttgctgctgcttataggggacctacattccaattagaaagtgtgacactctgcaaattcagcttcaagaccagtatcctaacctttctcccgatcccatatcagtcaggaaagactgggcaatgctctaataacaaataacccccaaattgcagccaaattgcagaaatcacggcaacatttctttctctttttcacaaaaaagcaattgcgggtccagatgactctcgtgggcagcatcctccatgtggactcagccatccaggtggcctctatcctgcagtgtccacctcacagctctggcaccatcatggtgcaggtaagggagccccagaaacgcttcactctgaagtgaaaccttcatcttcttccatccacaacagttgcctagaacatgccccatgaccccacctaacttcaaggggaggggaggtgatatggtttggatgtgtccccacccaaatctcaccttgaattgtaataatccccaagtgtcaagggcgggccaggtggagagaattaagtcatcggggcagtttccctcacactgttctcatggtagtgaatatgtctcatgagatctgatggttttataaaggggagttcccctgcacaagctttcttgcctgccgccatgtaagatgtgactttgcccctcattcaccttccgccacaattgtgaggcctccccagtcatgtggaactgtgagtccattaaacctctttcctttataaattacccagtctcaggtatgtctttattagcagcgtgagaacagactaatacaggaggtgttctgttcccagaaggaggggaggagcagatatgcatgagtactctatgttcccatcattcctccttccagaacattgccacatctgagaccctcctgtaaaaaattctggagccactaatgctttcgcagtatggaacaaacatattttccagaagaaatcagccagttttttttcctttccttttacataatgcagtgccaatgtcctcttacctggaacagtgcctggcacacagcaagcatcgtaactatttgttgaataattagtgaatacatgactggccgaatgagtgagggccatgcagtgcctctcccattatgtcaggactcttcttggaatgctgactgtgttttgtagagtgcagccctaggaagatgggagacccaggaactggccctgtctctgctgatagctccgtcagcttgaatgaggtctaagccccacggacactctgcataaagaagcatgcatgttgtgtaggtaacggggttggaactgttgtggtcattgcttcatgagggaaactagatagggatagcaccagggatggcaggctggagcctggggagggcggatcacagagaagctctgtgacgtcgtctggggttaggaacccatgaaaagactgaacttcctattaggcagggagaaaatggggagggtctggcttgatgtctcttggagaaatctggattacacaaatatgtgaggccaggaaaccaacaaggaaaacatgacctgtctttgctgataatgattgtcctatctgcataaactcacaaggatggaataagaataaaaccaacaacacacttccgccaagacttgacagtttgcaaagcattttaaaatacaaagccaactctgttaatggtaacttggatagatgttccagcttcagtccaaatatcttacagatatttactttagtcctcatagcatgactatctttatttcacaatgaggaaactgagctaagtattttacccgaggttttacagttagtagccaagacaggattcgaacccaggtatctggctctagaagccacacactgaactctgcatccagcagcctctgcagaaaacacaataaaactcttctgatgatgccagtggctggaattccaccacttatacagaacaatagggctggagttgctctgagagaatcatgtctatttcgaggaagttgaggaaaaatatacctaaattttgttttggtgtagtctaatcctacagtataaagaacttttgtattgcatttgaattcttttatttattctttcatgagcaaaaactttttgcacacttactgtgttccaggttctgttctaagcttgtgcagtgcatgctacctcatgcaacctttgcaacaactctccctgctagggggccactctttcctaaagcaggcaggggcccagaacaggctgttccaggcctcctctatgccttattatcacagagagagcatagaatattcctcaagcaacaagaaagagcaaggaaatacatgttcaatgcagacatccacgtttgtgtcatctcagaggaaggaacaggatcacccgttccctccaagggaaaatatacccttttctttgcttttattggttttaaggcctgggacagtagttctccaccttcttgggtcacattgcctttcactctgccagattctgtttcctttctgtgacacgaggatagaaataacacgcatggcaatggattggggtggtattccaacgaaataatgtaacgatggccctttgtgaagtggaattcatacattcattcactcatgcattcaacacatttactgagggcctattatgtgccaagctcctcttgaagtctctgaggcctgaagagtgaagacagaatagatgctaaaggcagatttctggaacaaactgcctggggtcaaatactagcctcattactcactaactatgggaaagttaagtataaaacctgactcaaagggttagtgtcaagtttaaagaagttaatatctgtaaaacatttaaaatagttcctggcatagagtaagttccagaaatcctttgataataaaaaaatatttttgaaaagaacaactaagaaaaattacattcagtatttctacctaaggagatatggctgtatattttaccttaaaaatatcagagatgttaaaataatagaacaataaatagaataataaacatctgtataactttttaaaaagatttaaagcccacattttgtgtttttttttttttttttttttttttttatggaaacagagtcttgctctgtcacccaggctggagtgcagtggcgccatctcgctccacctcccaggttcatgccattctcctgcctcagcctccagagtagctgggactacaggtgcacgccaccaagcccagtaaagcccacattttctaaatgtgaaataaaattttaattcttaatcattagccatcaagaacacacagatatctagaatgccctaacttattaatgtcttaatgtattagttcaagtctcaaaagcttaaagcaataaaatgtattacctgctgaagtaaaccctcatatacctgtgatagcagttcctccaccatcaagaatctggaaaaaggaggaaagcctagaaaacaacaacaacaacaaaacactgcttcttaaagatatcaaccccaaagtgacacctatcacttcctctttcatgtcactggccacccccaccttcactgagaagaaaaaggttaattcgactacacacctgacttcactgtttgatcatctgattgtggacaagtcacttaatttgactgtatttcagtttccttgtttgttaaatgaaaacagaaacagtgctttgctcatggcattgtcatgagacttaaatcatacacaaaaatgttagctataatgacaatgtgatctacccacagaaaatataaagtattatttgtgtgtgcatgtctgtttaatgtgagtagtatcagactacatttccaatgccgataaaaatgtgtgatctgactgaaacaataacctcgcattttatttcaaacttacacacttacacaatacatccatacatgcgagtcaccattgcgtttcgttcccatgaaaacttggattgcgtcagagttttattgcttttgacccaatgccacttaatgattgaaaaaaaatggtgggttcatgtttggtatttcctgatgcgggcaagggagcagggctgctctcagcaggcggttcttacccacgtgctcactggccctccgcaagctgatgtccaagacgacagacacatggtttagggagctcagatgcttgaactgtgacgcagctggaaacccaatcaggacatcggagaagaaagcagagtgaggtggggtcagaagggggcacgtgggacattcccaggagttggaactgaagaggggtgaaagggagggatgtgggcaaagtcaagctctggaagcagaggctcagggggtaccctgtgtttgtggttggggacagagatggggcaatgaggcccagcacccaaaggccaacagggctaaggtgtgcaatgacttcaggttgactctggaggctgatgagttgtttgtctggatggacgtgtggttggcagatgtcttgtgcctgcccagccttcaccccacacttctggggccatgctctgagcttgctcagggaaccatggctttgctggtctcagcacagctccagaaatgatcatgtggctccggtttgaccaatgaggcgccacatccctctggccacaatgattggctcaggaatggcatgtgacccagtcagacccaatcaaagctcaccctgggccttgctaggggaggaaggatggaaggtgtaagactccaccttcagagccccctgggtgggggtcacatgtgcctcagggtgatgtcaagaaggttgtgctgagatggagagaaaaagagtcatagtccctggatttggatatgctcaaagccagcttgtcattggccttttcttggcatgaggcaatacattcctttccttcgtttaaactagtcggacatgggttttctgtcacttacaacctaatgtcttctaaaacagccttccccaacctttttcacaccagggactggtttcatggaagacaatttttcaacgcatggtgggtggtggggagggattgtttcagaatgaaactgttccccctcctatcatcaggcactagttagattctcataaggaacccacaacctagaccgctcgaacacgcagttcacaacagggtgaatgctcctgtggtaatctaatgcagggatggccagcctttggcttccctgggccatgttggaagaattgtcttgggccacacatagaatacactaacacgaatgatagccgatgagctaaaaaaaaaaaaaaaaaaaaaattgcaaacaaaaatctcataacgttttaagaaagtttacaaatttgtgttggctgcattttattgcggcattattcacaatagcaaagacttggaaccaacccaaatgtccaacaacaatagactggattaagaaaatgtggcacatatacaccatggaatactatgcagccataaaaaatgatgagttcatgtcctctgtagggacatggatgaaattggaaatcatcattctcagtaaactatcgcaagaacaaaaaaccaaacaccgcatattctcactcataggtgggaattgaacaatgagatcacaggaaggggaatatcacactctggggactgtggtggggtggggggacgggggagggatagcattgggagatatacctaatgctagatgactagttagtgggtgcagcgcaccagcatggcacatgtatacatatgtaactaacctgcacaatgtgcacatgtaccctaaaacttaaagtataataaacaacaacaaaaaaatttatgttgggcgcattcaaagccgtcctgggctgcatgctagctccgggccgtgggttgggcaagcttgaatgcctctgctgatctgacaggaggtggagctcaggcagtaatgctccctcacccgccgttcacctcctgctgtgtggcctggcctctaacagaccatggactggtctctgtctgtgcccagggattggggacccttgtcctcaaagacagagtgtgcctctttaaagattgctgttctttccctcgcagtgaaccggtaatacgctcattctgcaaagacattcgaaagatgtttttggcctaactagaatcaattctgttgaattcccccaaatcacatcccaattcacttttttcctaagaaatccaatgttaatttaccctcgaagagcacacaactctgggtgagtctctctggcgtctcataccaatttttttccctttggcaattggtctccagatcattaatgtcacatataacttagggcccaaacagcccacacagcgatctccacagtgcctgtcatgatgtggtcgattttgatggcaaaaataactaattgaaaccctacgatttgtttactttgaatacattaaggtggtggttatcaaatggagctgaattatcccttaaattaccatgaaaacaaaatcaatagtttatttaccacacaaaacaaaagaaaaaagaaggaataaaatgctctgaggaatctttattagaagttttccttggaagaatacaatgtagataaactcagagtaaataaggtatatggtaacttggaggaataaactgacccctagttcataattgtttatttcttggttcctagcttataaatagtccggtggggcctttctaaagtctaaatttctttctaaccaagtgattagaataaatgtcccgtggtccaacaattgagtgcagtgtgggtgtttatactattacttcaactaaatactgttgttttttttttagatggagtctcactctgatgcccaggctggagggcagcggcatcatcttggctcactgcaacctctacctcccgagttcaagcaattctcctgactcagcctcctaagtagctgggattacaggcacacaccaccacacttggctaattttgtatttttagtaaagacagggtttcaccatgttggccaggctggtctcaaactccccacctcagatgatctccctgcctcggcctcccaaagcgctgggattacaggcgtgagccaccgcgtctggccggtacttcaactaaatatttaagattattagtacattgagctcatcaatgcttccactttggggtccaagagcaaaactggagctaattcagattatcaccacctaagttgcttacttttaaaaattattattatttttaaatttggaatgtctcagggtttctgctccaattcataattcctgtgtctttagtggaaatgtcagtactttataggatgacacacacagcattattcctggctgttgagacaccaaaaagcctgatttactgttccttccagaggatccccaacaccgacattgactaaattccttttctgcaagcatcctggcagatgttctggttaagaccttgcaccgtcacgagctcatccttttcatgctccaacagctgttgagtgctgtgtagccaccacccaagcatctgacatgtaagggcccttcctgcccacctcctggtgacagctgacaaactaaatgagaagaaaacctttatttttgcttcaaaagatggaaattggattataaattaatggaaaagcccatctgtgaacatgttcttacaatttctaaatgttacaagtcagagaagcacaagggcctgggaaatactcagtattggtattagtaactcctaagctaggattttcctgggggatggggaggagggctgcaaacagacagggaggctctgtgccctgatctccaagcctcgggggggaaatagaaccagaggatggggctgggctggagagatgggtcaagtcaaggtggagaggatgtgttgagatgctatggcagactgcggtggctcctcgtcgccatctgttttccttcttttttattagatattttatttgccatatggccatatagaatcaaaactccattttccatccaggcttgctggtagatgtggctaagaagttctagttgggggaatataaacctatttgttgtgtccagattctgagaggtatcttaaggagtgagaacattccctctgtccgtctgccagctggaatgcagactcaggcgtctgatctggagccgtcaccttgagctatgagtgagaaaccctttgctgatcatggcagagtaacaagctagaaggagccttgctcctcgatggcatgggggccgctgtattagccttaggctgtcctcctttacataagacagaaggacactttatcttgtttaaggtactgtccatttcggggggaactcataactgaacaaaatctcagatctcatctcagaaggcgtctctgagctagaaatcttggggagattcagaagtgtaataggtagttcctgtgtccaatatgattaggtgtcctggggaaaacttcataaactttgagcaggagggtgtggtgcagactggaagaggtttcagggttttgagaaaggtggtgaagggtgagaactctctcacccaccccaaatacgctgcttcaacttgaggattactgtgaactaaaggtgcttgaaaaacagcagatgcaagaagagcattctgatctcacattttcttcctgaagatgggagataaaaattcccatgggaaagatgccctctttgtgccaggagaaaagaaacattctttgatggggagtcctagccgagataattctgtacagaccttgttaaaacaactcttatcttttcagcctccccacatgagtgagctgctttttcacaacttactgttctctgtccaatttcactatctgagggactgactctgcttctttgggtcttcatttccttaagatggctcccatgccacataaaacttgtactaaataaatttgtatgcttttctcctcttaatctattttaggtcgatttcattctagagcccagctggaaccctaagaggttgaaagtggagttttgtctcctctgcagtggacactcaaagaactagccaggatgggttggacctgggagcagagagaccatggctcccttccaaggctgggagaagggagttgccactccttcccaatcaaaccatgccaagaacgaggcttttgcagggaaatcagtgcagatgagaacttaccaacagttaagatgaataaatatatccaactgcctggcccatgtcaacacgcaacaattatttgctaaaagaaataaaaaaggggccgggcagggtggctcatgcctagaatcacagcactttgagaggctgaggcaggcagatcacttgaggccaggagtttgagaccagcctggccaacatggtgaaaccctgtctctactaaaaatacaaaaattagccgggtgtggtggtgcgcacctgtaatcccagctactctggaggctgagacaggagaactgcttgaactcgggaggcagaggttgcagtgagccaagatgcaccagtgcactccagcctgggtgatagagtgagactccatcaagaaagagagagagagagagaagaaagaaaaagaaagagagagagagaaagaaagaaagagagagagagagagagaaagaaaagaaagaaagaaaagaaagaaagaacgaaagaagaaagaaagaaagaaagaaagaaagaaagaaagaaagaaagaaagaaagaaagaaagaaagaaaagaaagactgactgcatgaacaacagcccaggaaacacaagagaagtagcgtggagtagtggccaaggatgggtgctagaatctcagagcctatatctgtatatcaagatgtctcaggccaatgcctaaaaacagtgttcaataaatatcgaatagtaatattactactgttatcacaattgagaataactgagtgtcaaccagctgatctgcttgccaatgaagggactccaggatccttaagtcacttctatttttctccacttccctggcaactttttctccaagactagatcgattcaacactcctccaagtcctgggttaacctcagtggccctctgcctcccattgtgatcaccttcgtccacagcaatcttttccttctccgacagcacattattaccttgtcattgggcacttgaagtagacatcctttgacatcctctgtgaatgttaccttatttcattccttgttttcccagcatgtaatgggcaaacaaggcccttcaaaaaacagatctgaccctgttgacttctgcagacacatctagcatctctttcaacttgaaaaatcatgtctatattcctgcattcctaagctaccagctaaattttttataagtttaaatttatatttggatgtaattatatatttataaattacatatatattttatatttttaagatatttacttgtgtaaaataaataaataaatgggtaaaattttcagcatattgtaaatactggatattttaagagaaaaccgtaatataacttaaagtatgtccaactgaggctcaatacgattgtgatttgatacctgtcataattgatttttaaaaaaatacatacaggagcttctcatggttaggaacttttcattgttctttattccccttgaacttgtacacccctagaagaatttgatcataatgtatcatagttttattcttggaagttttttttattgattactctatcacatatcactgactgcaacaaaaatatgctcatacatttacatttaaatttaaaaaatgtctctgactataagtctttacattttaaaataagtttttttttaaacttatcattatggatgatcattctggttgttcgcagaacacaattgatcaaagcagcataagtatggcagagctcaggataaagaattattaatctgaaaaaagtaaaattatttggctattcttctcttagtatgataggtgggatttttttttccattaatgtattcatgaatattacttgttattttaaggaggcagtttcatcatcaattttattcacaccgttttgtttttattggtgtaagcactgagcattcgttcacataaacaagcagatgggaaaggggggccttctgttggaagccacgcacttgtttggactccttccaggttatgtgccaaaaatcacacaatgatttatcataaaaatatttttgataatctatgagctgacatccctattaggttcctcttcaatttcagtgaaagtgaagaattgaaaacaatttgactgtaaagggatgtggttccagttatacacccagatggggtacccagttgtcagagatgtttgtgttctcaatgctcaggctaatatttcaaaatgtgtctttgcctgatgccctgaaggacttttcccaggaggggaaaacgcctttgtaagacgcaagctgggtgatggcttttgtgtgaggacgtcttccaccatccacccttccccatcctccttctgtcctgggaggctggttgcatggaccacagcaatgggctcccttctctgctgcttccaagttatgttccctgccagtggttggaggtcagggcagggaagaataaagttgggctccatctgtgggatgacccagggtggctgcatctctctcaggaaggtcacagctccttcacattctacacagcctctcctgtctccagattctggaaacctctttcttctctaactctgcacagggccccactaaccctagagagctgcactatcctttgtggctttctttacttcacccacacctttataaacatttcctgtattaaactttcttcgaattacccaatttgagtgtgctttctgttttgtgttagtatcctgactgataaacccattttttaaattatactttaagttctggggtacatgtgcagaacgtgctggtttgttacataggtatacacgtgccatggtggtttactgcacccatcaagccatcatctacatctggtatttctcttaatgctgtccctcccctatcccccacccccacaacaggccccagtgtgtgatgttcccttccctgtctccatgtgttctcattgttcaactcccacttttaatataatgaaagagggcatttgtgaaggaggaattgaaaaataggatacatgtaggtagggggtctggaaattgatgatcttaaaactgtctatgcctgtgaacccttaaaaaattgtcatgtatccccagaggtgtgagtactccaatctgatgatggccgatctgtgagtaagttctttggtggggatttgtgagattttggtgcacccatctcgctagcagtatacactgaacccaatttatagtctttgatcccttactcccttcgcactctttctccctgagtccccaaagtccattgtgtcattcttatgcttttgcattctcgtagcttagctcccacttacgagtgagaacatacaatgtttggttttccattcctgagttacttcacttagaataatagtctgcagtcccatccaggttgctgcaaatgccattaattcattcctttttatggctgagtggtatatatacatacatacacataaatatatgtatacacacacgctatatatatatatgtgtgcgtatatatatatcacagtatatcacagtttctttatccacttattgattgatgggcatttgggttgcttccacatttttgcaattgtgaatagtgctgctgtaaacatgcgtgagcaagtatctttttcgtataatgacatcttttcccctgggtagataccgggtagtgggattgctggatcaaatggtagttctacttttagttctttagggaatctgcgccccgccctccctgccaccattttccatggtggttgcactagtttacattcccactagcagtgtagaattgttcccttttcaccacatccatgccatctatcattttttgattttttgattatgagatgatggctgatctaatgcctgaccaaccaccctgttcccttcactctatagtggtaaggacatggttgggaaccaaacaagcattaaagaaagctggcaaatgccttttcacaaatgccagatgatacaggtgaaagctatacagcatggtgtttgtccagcaccttccatccctgctactacccggccacaccaccactgccctcatctgcaggggaagcaaattcctcccttgagctcatgggtgcagtgggggctgcctccaagaagccaagaccccatgattgcctgcttgagtctagcaccaatcaccattgaacaaaagcccatctggtttatccaccaggttttttttgagcactgagttagaaattccaggcaacccattgagagttctttattgcagcagcgggcaactgatctacgataacatgtaaaaagataagggtccccaggcgatgacagcagctgcagtttaaagttgaatttggagttattaaagcgtgtgctgcatccacctgcaggaggcaagtgacgatctcaaatctcccatccctgagttggccagaacccccaaggtcaattgcccaacatacttggtgcctctgagacttgaagttcctggcagatggctgtggggtgcgcctgcactagctgtcactgtgactcatccctcagggcatgtcagattctggcatttattttcatttattaattaattttaaacaatagcaatctcagagcctcttagattgtgacccatcacaacattaaagctggtcgagccactctctagggccagggtttttgtgacagtttagattatcattaagcaaatattcactctctccccttcacactgcaggtggagaacacttcccaccctgctgatgtttggctgtgtgacttgctttgaccatttggaagtcagcagaagtgatgagagcaaagggattaaatgtgcagcttggctcactcttgctcctggggatctgctgtgatgagcgtgtgctctctttataacaggagctactgtcccttgatactcggtccagtgcgcacacgtgtggagcagatctgagcccaatccacagcctgcaccctatccagcagagcccatgtcgcagagcccgggtcgcagagccatgagtcacctgtgaatctgcgcgtgtgagaattagtgcttattttgaaccacggagatgggttggcaacaactgacaaatcactgagttttcaaattctgctctgtggaactcaacggaagtcattttcaaaaaaatggtttcattcattcacatatttattaattcacttgcttattctacaaacactttattgatcaccctaggtatcgtgcactgttctagagagactcatccatctcagcttatctgggctgctttttgatcttcctgagagaatggagggcctgtgtgtgcacattggtaaagtgctttgaaaggaatgaatccagcagatttcacagccccttctcctctgcaaggctgtgtagccttctctgaggctagctggggttggtgtgggcgggaaggagtcttgctgctacccgaacagactcagatgctcccctgcctccatctctgcattaaatcaggggctgtcaaggaggaggcaggcacaaggcgatgttcgtcagctcccggaggggcaggtctcttcacatcttgcctgggttcattggctcagccacatgctggtcgaccttgtttctgttttcagataaagaaaatgaggctctttttctttcatcactttgtccagtgaacttaggagcaaccaaccaacttcattatattccttggttctccacgtagggtcaaagatatcaggtatagagtcattaagctcctgcctctcatgagcagtgaatcaggagtatcaaatgcatttattttgcaagaactatcggtgttctccatgctattagaagtagagcccttagcatttttgagtctaatcatattaagcagccaactccagaaacccccaaatcaacaaaagaactccatccttaatactctgttcctctagaattactcctgctaccaaaatctgtatgagtcagggttctctagagggacagaactaataggatagatgtatatataaaggggagtttattaaggagtgttgattcacacgataacaaggtgagatcccacagtaggccatctgcaagctgaggagccaggaagccagtccgagtcccaaaacctcaaaagttgggaagccaacagtgcagccttcagtctgtggtcgaagatgcaagagtcccaaagctgaagaatttggagtctgatgttcaagggcaggaagcatacagcccaggagaaaaatggggccagaaggctcagccagtctagtccttccacgttcctctgcctggttttattctagccgagctggcagctgattcaatggtgcccacccagactgagggtggatctgcctctcctagtttactaactcaaatgttaatctcctttggcaacaccttcacagacgcactcaggaacaatactttgcatccttcaatccaatcaagttgacacttaaccttaaccatcatagaggataacaacaattcacccaattcttggcccagggaaagagcaggagccgcactcacatctctcaaatctcagtcccatgtccttctctttgctccaaatgccacttccctggaggattgtttttaagcccccattcctagtctctgaaaacagggggctttggctcagacaccgtggcctcatcctttcttcagactatgtttgctgagcttccgttatgtagcaagtgctgggaatacagcagtgaaaaaatgaatttcctgttcttgaggatgtgtggaagaacagagatcaggaatgacacacaatctatctggtgaccatgagctctgtgggggaaagctaagtagagtagctggggggttcctttgttaaaggtgtttggggaaggccactctgaggatgtgacagccaaacacagacccgaaggaaaggagggagcaagccaagcttataagagagtaaaaggtgctccaggcaaaaggcatagctgcacaaagaccccgaggcaagaccatgcctggcctgttgaggaacacagtgtttacttactggagtcacccaggagagcagcatgctctgtgttcattctgcgccttgttgccgtctcaggactaaactgcttgcatgaagtccaaggtctgttaattaaaaatgtaacaagggacaccccagtgtcttcagagtaaatctttacaactgagagtttgtagctgaaggcaactaaagcggttcaaagcgaagggcgatttgacaacgacatggctagattcaccagcagggctgggcaggaccacctgctggggctccaggaccacagacatgacattcccagggtgggacaagagaacagctggggaggctgtcaccccatcagggcgcctccctccccccaacagtcaaacataaaaaatagattttttatgactcctcccaccactctgtgctatggacacgaaagaactttgaccactgcgaccctcaacccctggcctttgtcctgaaataaacaaatgagtcctcccatctattacccaccccatgtgatgaagtgggctcctaggaacatcctgcatccaagtggcaaccacagtgcttgtttcaattacctcttatttatcccactggttagggagggatgtcccatcctaaagcatatgagatggctgaacacacgatgcccaacactggacagatgaccttggcagcagctcatcagtcacgtctactaacaccctgggggaggagggcatcacacgccgtgcagggccatgcagggttgtgctggggggcagagaaaaccagccaaggctgtggatggcaggctttgtggcaacaagaggttgaggtgcccctggtccctgcaggaggatgcagttggcttgtttcaataatctgtgggttggcagagaggtgcatccatgaggttgaggaccagatgtggtacagctggtgtagccggtaggggaactggccaggtagagactctttccttttgggtgggtgacatatctggtgagggcaggagaactcatggttaggcttttgggtttctgtgaggctcaaagatgtcaaggcagcatgtgacatttgagacatctcgctgtgcctaaactgtttacacaaaacagcatggtccctggcgaacatgtttttcttctgggagtctggaattttggtacatgccaggccaaggctgccccataaccagccctgaataaaaatcccaggcaccaagtctctaatcatcttccctggtagatgacacttcccaggcattgccacacctcactgctgggggaatttagcacatcttgtgtgacttcaatggcagagacccttggaagcttgggcctgacttctcccagacttcacccatgcaccatttttctttgttgattttgcttttttctgcaatacatcatagtcaagaggatgacaacatgctgagggttgtgaatcctcacagtcagtccttagtcctgtgagtggtcttgggtaccatacaccttgccttttctggattctaagcctttgctttggacctaacacctcatctcatctaacacctgacaccagccctgacttttaggatgatcttactgatcctcagtactctgttcaaatctcaccttgaccaagaattctgaagagtttttaccctccttagaattctatagcctttgatatcaaaatcacctatcgggcatggtgttataaatgatcgtcatcttccttcctaagaaccatccacgttttgagttctgtgacaagtgtcgatttatggcagcccctagcctggaagccaagataagatgacataaaataaacgtttttacattagtttgctctgtcctcaatgctctgtattcactgaaaaaagacttttgaagatagaatcttaatagatatcaaattattatctaatttcaaaatattttgacaattcttcatagacacagctatagcaaagtatgtctgtcagtgatagtgcctacaactggaattagtcctagaactgtgaatcctatttttaagtgtgattagaattttattctttagagcctggttgttttaagtcattaattcagtcatcaaaaattgatggagtgcctactaagtgccacacacagaacattctggaatttcaaaattaacaagatttattatctgctttggaaagatttggtagctatatctggtagttttggcagtttttctgtgtttatgtgcctacccagtatctaatcacccatgtcccttccttgtaatactctctgtggatatcatctgtcttccaggtagcccatgactcagaggggaactgacctgacccccaactacagcagtacacccggattggtctaagctaactagagtaatcctactttaatgaaccaatgattcattcagtgaaaccaggcttaatccaattaatatataatactctcccacaaggtggcccaatcagtgaaaaactcatattttctttggaaatctccttctgaatgtgaaaggcacggttatctggataccagaactgctgggtcattttggaaggccaggctgaggatgaggagaagggcccaatacagagtataaaagataaattggagagggaacttgatcaagccgctcctgatatccaaatttctgaacttattgtttatctgaaccaatagattatttaaaataattaagccaggatgagttaatatttttgatgttgacattcaaaattaatctacattatttactccataacatccatctattctttctctcattgtttattgtctgattttcttttggaaaatgtaaccttcctatattctcagacatgtgttttgagtgggactcctaccacactcagctctatatgacagtttagattagcttaaaccaattagcatattctattattttggctttgatgattggtttagggataaacacaaaacccaattaaggctatagaaatggtaaaaatttcaagacttatgcagtagatacagtaagagacccttctccttcccctagtttctgtggtgtgaggatctgcattctagacatccaggagccattttattgccacagatgagaactcagaattgttcaaagttgaagtccacagatgaagccaatgttgcagaaaacagatgaaggagagaaattaaaacatgtacaatgctggattcgacttgtcatgaagcctgctacctctggacttctctgttatgagtgcaaagaaaaaaatgtttaaacaagtttgagttagattttctgacttttgctacatactaatgttaagtactattataagggtttattctaagtctcatcctaagcttagtcctgggatagactcaggatgaatgaaaccagggaggtgaactggagaagctcacatcccagaggtagaggtggcaaacatacgtggggttgtgacgcagggataattgtaataaacatattaaataaacgaatgaatcattattctataaaactggctgggtgcattggctcatgcttgtaatttcagcactttggaaggccaaggtgggaagaccacttgaggccaggagtttgagattagcctggccaatatagtgagactctgtctctacaaaataatagaaaaacttacctgagccttgtggtgcacgctggtagtcccagctacttgggaggttgaggcaagaggattgcatgagcccaggagtttcagattgcaatgagctgtgattgtgtcactgctttccagcctgtgcaacagatgagaccccaactcaaaaaaaattttttttaatcaaaaactgatatttacagattctggttgaggtaagatgttatatatacactctaccatgtttctcccactgaatgaagatctagaacctggaaagacagcagtaatccgagggctctgaaaagtaaatagttgtaggtggatcacagaagatcagaatgtgaagtgtcactaaactggttgtattggtccattgtcacactgctgtaaagaaatacctgagactgagtaatttatcaatgaaagaattggctcatggttctgcaggctgtacaggaagcatggtagcatctgcttctggggaggcctcagggagcttttgctcatggaggaaggtgagggggaagtgggcacatcttacatggcaggagcaggaggaagagagagagggggaaggtgctgcacacttttaaacaaccagatctcatgagaactcacgaacttattatcacgagaacagcatcgagatgatggtgctaaaccattcatgaaggaccaccagcatgatccaatcctcccattgggccccacctccaacactggggattacaattcaacatgagatggtggggacacagaaccaaaccatatgcactggtggtgaatttgccatgttttgccctttggtatcaccggacctgatcctgaaactcagaagtgagcaatggggcaaagacagagctccaggggcatttcagggatgccctctagttctggttcagggaacttttaacactcagggtgtggacatctccactgtttttttcttttctccattccctcatgcccaagtgagaggtgaagccagttggacttcctctgtggagtggggacttggagaacttttctgtctagctagaggattgtaaacgcaccaatcagcgctctgtgtctagctagaggattgtaaacgcaccaatcagcactctgtaaaatggatcaatcagcaggacatgggcggggacaaataagggaataaaagctggccaccccagccagcagcggcaacccgctggggtccccttccacattgtggaagctttgttgttttgctcttcacaataaatcttgctgctggtcactcttgggtccgggccacctttaagagctgtaacactcaccgcgaaggtccgcggcttcattcttgaagtcagtgagaccatgaacccactggaaggaaccaactccagacacaagctcttaagcaaccttatgatattgatgggcaatatttgaacaagactcagagtctcataacataatatataaaatgtccaggataaaatccaaaattccttgcttattaagaaccaggaaaatctcagtattcatgggaaaagaccacgaagagaccccaataatgaaataacacaaatatagagattttctgacaaggactttaaagcagctattataaaaatcctccaataagcaattatgaacactaatggagcaaatggaaacatagatcctaagcaaacaggaagaatctttgggatctgcagttaggaaaatggcttttagatgtgataccaaaagcacaatccattaaaaaattgatagaattaatatatttgtcataaaaattaagaacttttgttctgtgcaagactctgttaatagaataaaaggtcaagtttgttactgggagaaaatctttgcaaatcatatatctgacagacaaaaaaattgaatgcagaatatgtaaagaattcccaaaattcagcaataggaaaacaaacagcccaattaaagaagaggcaaagatgtgaatagactcttcatcaaagaagatatatagatggcagacacacacatgataaaatattctatctcattaatcactagggaaatgcaaattagagccacaatgagataccactccatacctattagaattagaatgggtgcaataaaaatcctgacaccaccaggtgttagagaagttacggagcaactggaactcgtgtgttgctttggaaaatacaaaatggtacagtcactgtaaaaatcagctttgtgtctccacatgaagttaagcatacatttaccagttgatccagtaaccccactgctgggtatttaccccagagaaaggaaaacttacgtccacacaaaaacttgtgcacatatgtttatagccgctctctgtgtaattgctgaaacatggagggaacccaaatggcctttatcaggtgctggggtaaaaacagctggtgcgagaccactgtgaaaggaaaatcaatctggggaccccgaaatcactaagccacggtgaaaagtcaagctgggacctgcattgggcaaacttgcctcccattttgttcctaaatactgtagcaggatgagctgcagacgaaaatcctcagatactgagttaaagaaggaaggggtttatttggctgggagcatcagcaagactcctgtctcaagagctgagctccctgagtgagcaattcctgtcccttttaagggctcacaactctaaggggctccacgtgagagggtcgtgatcgattgagcaagcagggggtacgtgactgggggctgcatgcactggtaatcagaacgaaacagaacaggatgggaggttttacaatgtccttctatacaatgtctggaatctatagataacatcggttgctaggtcaagggtggaatttactaccaggcttaagtcaggcaggcccaggcctagtttcgggtctggttctttggttttgggtctggctcttaggagctgggctacctgccttttgtttcgcttttctttccttttctgagtataaaacaatataaaacaatatgagagggtctgtctctcttctctcaatacgattgctacaaagattaaaaaaaaaaaaaagttgcccacctccctcacaatttacccacaaggaaattccttgtggacaaaggacagacagaactcagtcatccctctgctcactaagataaatgcatatctgattgtttcctctgccctgttgtttcactaagccagactaaggcataagtgactattcctctaccctcctctcacgcgtgaactgcattttcagtaaaaggctaatcagagactcaagagaatgcaaccgattgtctcttatctacctatgacctggaagccccctccccgcttcgagttgtcccacctttccggacagaaccaatgtatatcttacatatattaattgatgtctcatgtctccctaaaatttataaaaccaagctatgccccgacaaccttgggcatgtgtcatcaggacctcctgaggctatgtcatgggcacgtccttaaccttgacaaaataaactttctaaattgattgagatctgtttcagatactttttgagtcatgccactcagcaatacaaagcaatgaactattgataaacacagcaactcctttgattctcaaaggcattatgttgaatgaaagaaaacagtctcaatattacatactgtacatttccatttatatgactttctcaaggagaaagaaaccatacaatacaagaagggtgtgagattatatggggaaggggatggggtgacttggagaagctagcataaggcgttttttttgttttgtttttctctggggaggatagagctgttctgtatcctgatcatggtggtggttacacaaacctatacacacattaaaattcatagaactgcacaccacacaaaggtcagttttattgtataataattttttaaataacatttaaggtcacactcacacaaaactgatctctctgaaagtattagttggatttccctttatttatttatttttttaaaggacaaccccgctggccccaatctcacctaggcatggcctggatttctgcagaaggacaggccagcagacctcacttcaaaggtggcatcaaacactgttcctgcctataaaaatacagtacaagcaagcctgattttaaagcctcatttttcttcctcttcctcctcctagttctgacagggcatatggaaataatgttagaatgtaaactttgagcatgaatgagaattctatttccagagatgtttatattttttttctcttgggttgaaaccctcaatcatatccaaataaattatttggggatgttggtaagaggataaatcttagggggttttcacaaaggtctgaattctgagaacctctttttcttgggactgtgtgttttctagagagtgggaggcgctggtgggttacatgacattttgaattactatattttcttttccctttatatattcacaaagcactctagatattgggcaactgcaagtccaaggtgagaaggaagataggcttttgcaaagacaatcactgttcaaagcacacgcaaagattcaatgtattcatagagccctcccaaaggaaacagcaacagaccagagtctttattcacattttctcaaccagcaatcgggaaagaaatacaggtaataagatacgaaatacctgttgcctatgtttaactttgtttttaggtagccagggactctgtttaaatggctggtgagtgagggtggaaatattacataatgaagagaggggtgtttaaggaactgcagtttaaagttttgtgcaagaataatgccatgttgttttattttgaggtggagtctggctctattgcctaggctggagtgtagtggcgcgatctcagttcactgcaacctccacttcctgggttcaagagattctcctgcctcagcctcccaagtagctgagactacaggtgcacgccactacacacagctaatttttgtatttttagtagagacaggatttcactgtgttggccaggctggtctcgaactcctgacctcaagttatctgcccgccttggcttcccaaagtgctgagattacaggcttgagccaccatgcctggccacaagaatgatgtgtgtgtgtgtgtgttttttttctattccaagcacctttcctgcctgcccagttttgagagcatgtgtgtgtattcattagtaagcttcggctgtaagtagcaggaatctaaattaaactgcattcaaagataagagaagatggaagtggaggattggtttatttaactaaaaagtccggaagacgattgcaggcatgtttgcatctgggggttttatccattatgagtcttagttacaagcaggaaaaatcaatctaactcattaagtataaaatgccttattgaacactaatttttcatgtagaaaggcatgaaattataagatggaaaattttctaaacatgagaggagatttaaatgggggcaaacaataataaagacaatattaacaacaatggcgaacacaattccgtagttattaaatgcctggcagtcttctaagatcttgtgtccattaatttaatcctcaccacatccctttggagattggtcttctttggatgaagaatatgtgataaagggacctaaagtaacctacccaggtctaggctgaccatccctcctgtcttccctgggacaatcccaacataatgctgtccaaaaataatgaggaacacccccatttattctcaaaagtggtctgatttagtcaatagatttgatcatcattctactagggtcctacagccaggaagagaagtttggatggcaaggacacacttgtgaggtccgatgacattactagattgtctccctcctccatctctcagccctgccttcctgtttgggctcaccttcaggtggtcctactccacaggggggaccttgtggcccgaggctgcccaggctgagctcctttcacttccaaagtcaattaaaagagacatcccctggctaagagtttcaatagaaatcagaatttcagctcactggcccagggtgggtctacgactcccttttggaacctcggctgatgccccaggaaactcaaatgctgagagtagtgggtattgctcaacaaaaaaggggttggagggtgttctgatccagagaagtagaatggatgctgggattgggggtgccgtgatccagaggaatagaagggacaagtggcagatgtccaacctaagtctcaaggccaaccatttattatggctcctttgtacaaaagacttgttggcaaaactggattctttctgcactctctgaaatactatgtatttactgatgatcacagaaggctgatcgtatcatgatacaatcagatgttgccattggaaccaattctgtcggtgacacaaagatgggcagaaaaaagggtcctccccaaatagtttgtaatctagggcaggggttggcaagctttttctataaagggccggatagtgaatattttaattgtttttttttttttttttgacagaatctcactctgtcgcccaggctggagtgcaatggcatgatcctggctcactgcaagctctgcctcccaggttctcgccattcttctgcctcagcctcccgagtagctgggactacaggcacctgccaccacacccggctaatttttttgtatttttattacagacagggtttcactgtgttagccagggtggtctcaatctcctgacctcatgatctgtccacctcggcctcccaaagtgctgggattacaggcgtgagccactgcacccggacaatattttaggttttgagggccacgtgttgtctctgccatatattcttgtgtgtgtgtgtgtgttgtaaaaaccattgttagttcaggggcaggacaaaaacgggctgagtgggctggatttagcctgaggagatggttggccaattcctgatctagcagagatgacaagaagacatagttgtgtgaacagaggccatggctgccttatgtcgcctgtggtggccccatctgtgtgaacctgctgggtccacatgaaggaagagaggagcctcaagaagggccatggaggtgagaccccagagtggacaccagggctgctggagcagagccctgcaatttgctggcagtaatggatgtttctcctgagaaccccttctgcccactgttcagctcagacccaccagggtctcacgtcctgagtggagccagaaatgaccatgtagctggtaagagccagggtactcgctgctgccagagggccctttaggtgtagaggagagtttctcacttgctcttctcctccattggctactcactcaacacctagaataaacaccagactcctacagagtctgcgatgtaggtcgacctcctgcccaattctccaccctcctggcaccctcccctttggcctcctaccccagccacacccacctccaggcttatgagccaagcatggtctctcctctatggcttcacaggtgctggtcccctgcctgaaatgttcttctcgtcagcatccacagggctcatctcacgtaggtctcttctgaaaatcgaccttgttgagaggcctttccagatcactctaaaatagccacctctgccttctttatctttgccttgcattaattttctttgctgcacatcacatatgatatgctttggctccgtgtcaccactcaaatctcatcttgaattgtaatccccataatccccacgtgtcatggaaagaatcaggcgggaggtgattggatcatgggggcggtttccttcatgctgttcttgtgatagtcagttcccatgagagctgatggttttataaggggcttttcccccttcactcctcgtgctcacactgtctcctgccgccttgtgaagaaggtgtctgcttccccttcccccataattgtgagtttcctgaggcttcctcagccagactgaactgtgagtcaattaagcctcttttctttataaattacccagcctcgggcagttctttatagcagtgtgaaaacagacaaatattagattggtgcaaaagtaattgtggtttttgccattaaaagcaatggcaaaacagcagttacttttcaccaaccaaatacaacatctttgatatatttgtttgtcaattcatttattgttagtccccccaactgaaccaaaagctccaggagggcagggatttttgtctgttttgcctcctgtatgcccagcacctagaaaaattctggaacaaagcagcactccctagatatctgctgaatcaacgaatcaataaatgaatgctggcacaaagataatcactcttttccagaggccttgaacctaagaagagatgaaaaatgctacagccacaaaaggaaagtctgtctgagctaagacagagatgccagattctgatggcatcaattgaacaacttgatcaagctacacctgaagctagccctactgctgcagctttcaatgacaaaagtcagcaattctcttcataggtttctaaatcattttgggttggagattttgcttcttgtaataaaggatatttttatttgggtagtcaggagagaagaggacaaggcggaaaggcaaggagggatgaagatggagcatgtgagtggtcaaatgatacatcaggagatatggcaattctggcctctaagaaaatatagttctctgtaagccttagagaaaatccctttacaaacacagcaaagcctcgagctgggcttacttggaacacacattctcactacacggagagtccagcacaaagcaggaaggagcgtgggccacagagagaacacagaccctggggtcatgtgagtccagtgaggctccaacccgcccaggccgctttcctgcagtgcagcctttggcaagccctcgaacctcaagtttctcatctgaaaaatgggctgataaatctgaatcccagcagtgttataatgagggtcagtgggacatgtatattagagcacctcgtgcctgacataggacctggcccatggcacatgttcaatacacagcagctgcaattattctggtggggtctggatttcccagcttcaagtgggtacctgaatttggagatttgctaaaactctgcctcctaccatcagaatttagtgtcagaaatacaattgggccaggtgtggtggctcatgcctgtaatccaggcattttgggaagctgaggcgggaggattgcttgagtccaggagttcaggaccagcctgggtaacatggagaaaccccatctctacaaaaaatacaaaaaagtagctgggtgtggtggtgcaagcctgtggttccagctacttggtctggaggtgggaggatggcttaaacctgggcggtctaaactgccccattgaaacttctctgttttcttacatctgttttcttctctgttttcttacatgcagtgagacgagatcatgcctctgtactccagcctgggtgacagagcaagaccctgtctcaaaaagaaaagaaaataaacagaattgttccactgacaagccagagaacatcacttccccagagattgtgtcccaccaaattacaaaatgcttttgcaaccaccagcacagaacatcccatagaaagcattaaatgacagtgggccagccagatgcggtggtacacacctgtattcccagcactttgggagcctgaggagggaggatcacaaggtcaggagtttgagaccagcctggccagtgtgatgaaaccctatctctattaaaaatacaaaaattagccaggcatggtggcatgtgcctgtagtcccagctactcaggaggctgaggcagaagaatcgcttgaacctcggaggcggaggttgtagtgagccaagatcgcaccattttactccagcactctgtctcaaaaaaaaaaaaaaaaaaaatgacagtggaccatatactgatgaagctcccatctttcttgtttccttctcggcttcctttccatccttttggttaagccaatgagagatgctcagtagggtgcaaacaatgtcttatcatcctaggaaacaatggcttcctaatcttccatgctaattagggatgatgtctgaacaggaattccagttactcaactgcacagccatgcatctttcaatacttggtgcaccttcgcttaccagtttagttaagctctaaggagatagcatctgtctttttgacaagatgtaagaaaacagagaagtttcaatggggcagaaggcaggaaactttcataccaaggatgggcagcccaggaggagggacaaaggccggggcccctggaaattgggaattgggggtggggggacaggtggggagcaaggttgttagaaggaggctgggaggtggccatggagagaagtatgatggggacatgctgaagccacagtccctcactgacatcctcacagagggatgcatttttctgctgtgctcggaccgttgtggatgcttctgttccagtagaaaggtgcactgtgaggctcatgcctgccctgtcccaggcccagagtcgtctgtcatctgaacacctccaagtcatctgcggctggcagagtcccagctcccatcaccatccatcaaagctggtgatgaatccaatatccggggcctgtgagcccggagagaagcgaacagaacccatctgtgtgggctgcttggcgctgggacacaggggcctgaggagctcctgatggaggaggaggccagggctggcagcctcacatgttttccctcccgtctcgaatttctctgtccaggagtagcagacagtgtggaatgcacccctccagagaaaggggaaacctggcagcctctgaggcccgtccactcactggacacatggaaatgagccccaaagggaagcttggagaagaaggagccatttatcaggtccccattcacctcttcctaaggacacaagaagacttgtttggccactgctgagagacccactccactggaagaagtttccagaagttgatggatggtcgcctgtatttcagccagttgttcatgactcagggtcaatgctccattgctcccattcacacgttgcatccatcttccttgcagatatttgagttctcttctgtttccagcctcaacatatctcttgcttcctatccatatcaatgattcctaatacgtgtgtcagacaaaggctgttactgtaaaatggcagctttcttcatagaggttccatctgggctttgacatacagtggttccatggaagggttaacaatgaacatttggtgttttgaaaatgtgttctgatatttcagaagaaaagctgaagcaggggcggaaatcccccaccaggaccctggaggcatggtggccctggctctgagatgcaccagctactgaaattcacataataaaggaaaaatccaggaaaaggtggggagagaaggtggcagaggggatggaggaagagcagagggagagtgtggacatcctggaagagaggggaggagatgcagggaggagctgactgaggccccatcctctgctggaggtttacagacatcactttatttcgttctcgtgacaagctctccaaggcaagaattatgttataaatagattaaggttggcagctcttttttgtttggttgttttttgtttggttggttgttttttgtttgtttgttttgtcttgtcattgttgtagcgtagcacatagagcaatacctgacacatcataggcgctcgagaaatactgatggatgaataaactaaagaatgaataaaatgaataaagaaggctctaagatatgaatagacatttctccagtgaagatgtgccaatggccataaaatacaagaaaagatgctcaacatcactaaccattagagaaaagcaaatcaaaactacagtgagataccacctcacaaccattaggattcctataataaataaaaaaaaaaggaagaaacaagaaaacagaaaataataagtgttggtgacaatgaggagaagttggaacccggtgccctgttggtgaggatgtaaaaaggtgcagctgcaatggacaacactatagcagatcctctaaacattaaaaatggaattaccatacgatccaggaattccacttctgggtatgtacccaaaattactgaaagcagggacctgaagagagatttgtacacctatgttcaaaacagtattatttacaatatacaaaaggtataagtaacacaagagtctattgaaagatgaaccaggtagacagcgcccttgacataagtgactccatgttaggaaaagacttcatcttatacttcaaatagtgtcatgtcaacagggaccagatatttgcctaataaatagagacagcccccaatcagataagaacataaccggacatgcccttttactatcatcaccaggggaccctggagctataaaaagagcagggcttcgccagcttaagatagccatcttaataggcactgccttcctgtcccttgtgatcagcatccaggatctgccactgaaggactgcccaaatcaaagactattctttgcaagatgttgatacccatccagatcaggccaggacactcttcttgtccacgtcactctccttggactggtttgttaaccatttttcctatccccttttctcttgatgtcaaatgttattttgtttgatgtggaatatttaacctatagcatttatatattaagtatactactatgtatggcttgtaatattcactgatttgcggatcgtcttgaatgtgtgtgcccatggctttgatgaccaagtgaacggagggttggggtactaagaagaattgtctccttggaaactccatgtaatttctggcttttatggttgaaataggatcaataaaagtctgaccttgtggaaagatacaaacgtgcattgacctggttatgtctgaccttgtgccactcatgacaaacgaatacagaaaatgtggtatatacgtacaatgaaccattattcagtctcaaaaaaagaggaaattctgacccatgctatgacatggatgagccttgatgacataatgctaaagaaaagaaatcagttatgaaggaacaaatgtagacgctcctcaacttacaatggatttacgtcctggtaaacccatcatacattgaaaatgtcataggccaaaaacgcatttgatacacctaagttgcagaacatcatagcttagcccagcctaccttattcggaacacttacattagcctaattttgggtaaaatcatctaacacaaagtctattttataataaaatgttgactatcttatgtgatttattgaatattgtactgaaagtgaaaaacagaatggttgtatgggaactcgaagtggggttctgctgcatacgtgtcactttcacaccattgtaaagttgaaaaatcctgtgagttgggaccagctgtgctgatgattccacacatacgtagtacctggataggaaaattcatagagacaggaaggagagggtggttgccaggggtggggagaagggagaatggggagttagtgtttaatgagtacggagttgcaattttgcaagatgaaaaggattctgtgcatgagtggtggtggttgcacaacaatgggaatgtgcttaatgccaccaaactgtccacttaaaaattgtggaaatgggctgggtgcggtggctcacacctgtaatcccagcactttgagaggccgaggagggtggatcacgaggtcaagagttcgagaccagcctgaccaacgtggtgaaaccctgtctctactaaaaatacaaaaattagctgggcgtggtggcgtgtgcctgtaatcccagctactcaggaggctgaggcaggagaatcgcttgaacccgggagggggtggttgcagtgagctgagatcgcaccattgcactccagtctgggctacagagcgagactccaccttaaaaaaaaaattgttaaaatggttaatttttaagtgtattgttttaccacaatataaaataatattttattttattaactattattaacacaatagtggtctttggcaactatgggattatttcaggggttggctaaaggggtctcagcttcaaaaagacaaagctgaggaaaagggagaaaagagagtgagaaacacagccagaaggggctgaccagggctgagggaaaggaagctgggccagggctgcgggcgaagccctgttgaaagggcaggtgaggcctcacaggcaggggctcgagacccagccaggttgaacctagggctggcaggacacttccatagtgataggaagcccagcctccctcccagtgcctggcgtgggccgaggccttgtccatcgaggcctgctctgtggattcaggaagaagaccataggcaagaaatcttttcgtttcgggagacagaaacctacctcaaattgctgcaagccaaaaaggaattcattggctcatgtgactgagtcatcaagggataacacaggctttgggcacagctgcattcaggaatctgcctctcattccatccctctgcttttcttccactgttttcgcttaatttgtaggcaggttttcccctcatgatggcagagacggtcacaagaagctccaggctacatcttacagcccagcaatttcagaagtatgaaagagagccctgggaggccgaggcgggcagatgacctgaggtcaggaggtagagaccagcctggccaacatggtgaaatcccatctctactaaaaacacacaaaaaaatgagccaggtgcagtggtgggtgcctgtaaccccagctacttgggaggctgtggcaggagaatcacttgaacctgtgaggtggaggttgcagtgagccaagatcatgccactgcactccaccctgggcaacaagtgaaactgtctccaaaaaaaaaaaagaaaaaggaaaaaaaaaggaagcgagaccagatcctcagagcgctgagtgctggctaacctccctcattggccgggcatggtcatgtgaccatcttccattcaaaactttgcccagcagaatggataactctgattggccaggctgaggtcacatgtccactcctggagccaagggtggggtcagccccacactaactacagggagaagaggtggttctccagagggaagacaactgctgctaccataagctgcagaatgcatgcgaggcagacaaaacctggaaggccatgccagtgctccttccccataagacccactggacaaggcagcaccaggttcctgggctcagacataagaatgaggcagaagccaacagacagtagaaaacctgttctctgtagcttccaaggaatgacgggccacagggcacctttggcctgatccttctgcagacctggcattgcccggagaggctatcctcggacaccctagtgagatgaccgcatgcccacaccctcactgacaagcagcccacttgctgcccgaaggagactgagtggtggcactgtcctctctctctggccaggaggctggcatttggcagagctgccagtactggcagctgagagcttctcagggtccatgccaagtggtgtgacccagtgggactgagtgtgaaacacctggcccagtgcatttctgagccagacaaagccagcctctctgtgcactgggcatgaaaagcaagaccaggcagccacgactgagggacaccagggcatcagcagcttgatggggagaccaattgtactttgaccccatcagcaggagaaactcagatacaatccttaagcacgactagagtgggtgagagcaagagggggcagaggaaagatacaaggaggcagctcaaaccctcccacaacttcaaagtgggaacggattcctcaggaccctctcctgggctcattcactatctcctctttcttctcacaagcacatccattttacagggcccaaggaagaaggtgagggtagatgggttggaaactaggaatgtcttccattattcacttttctcataataatagcactcctgaattctagctgggtgtacagctgcacagagtgaagactacatttcccagccttctcagggctgggtgtggccatgtgaccaggctctggccaatgagactgagcagaagtggtgaatgtgactcccttctggagtcctcaaagggcaaggatggcagctctccctttcatgtggttggaacccagacatgtcagggagctgtcatgggccatgtggaagaggggcacaccctagggacggcaaccacaagacagagggagcccggtgcctgcctgaccccattgtagagtggagctgccctaccacctatgttgaggtcactgttgctttgggtctttgcagcagcagcctaacttatagaccagctcttccagattggaggaagaatccagagaattcccctcaaatacaccagtgcccttcagaagaatgaagtcaaaacacggagacagaatcctgggacctagggtgggaaagaatggagtctaagctctgcccacccattcagcaggtaggcaaggtgagcctgtctgccactgttcctgctctgaggataaggaggtgaaacaacctggtcaacagcattacctcctggtgctgacagttcctgtgtgggaaaacagacaatcaataagttaaaaacaaacaaacaaaaaaagatgatatttttctgagagtggtgagtcctctgaagaaagcaagcaggcccgctggtgggaaaggctagtttatgttgagtggtcagaggagctggcatcagagctaaaatctgcaagtggagaagaagctgcatgggaagactttcacagtgagggaacagcaggggcaaaatcccagaggcaggaacagctttgcacaatctcctaagaaaaatcttatgatcctaagagctacacagcatgcttactgcgcattaggagtggttcttggcattcctatgtgtcatatcctttaaccctcacccctaaggtaggcgtgatgattttcttcttcattttacaaagcatgaaactgagacggagggatgtttaatcaacttgcctaggtcccactgctgataaacaatcgagccaggcttagaactccctcccttccctcccaggctgggaactctctccccttctgcacttccgttttaccaccgagccttaaatcctgcagtggcttgaaaaatataaaccctgtagttgtcagagctaatgaggacaggcctgtcctgtggcctctaccccatccagatccctggctggcttattgaggtgtcataaaacctcactgagtgaatatatggagaacatccttgcctaaaaggacggtcaggggcacagaacaacatttctttccttcttatttctctaatggagcagaccgtcttgaagctgtaactcaagccaatgtggcaatccacaatcagccatcactgagtgccaggggtgggtcagcacttatgccaggatcctggggttaaaaggtgaatagaccacggatctcagccccctcaaagattttggtgcccatcccagccaagctcctatggcttttatttccttgaaaagcagcatctgagcagaacagctaaagaaggccaagtaagaagcagtcttggctgagtgtgatgactcacgcctgtaatcccagcactttgggaggctgaggcgggcagatcacttgagcctaggagttcgtgactgacctgggaaacatggcaaaatcctgactctacaaaaaatacaaaaaattagccaggcatagtggtgcatgctggtggtcccagctacccagaaggctgaggctggaggattgcttgagcccggggagatggaggctgcagtgagctgagattgcaccactgcactcggccactgccttcattcagttccctgtttcttttgctgtcatctgctactgatctctttgtttccagtcttgtcctaaaatcccatttccagagatcctgtctaaaaaaaaaagaagcacacagtcttgttgcaaaggaatcaaagatcaataaaattaatgtcctgtgaataaaaccatgaatgaaagcccctctttgccccagtttccccttcacttccacttccctccctgaaagccaaccttatcaatggtttgtatcctttcctagagtttggttttgcgtaaataggggtacaatgctttagatattgctgatccttttgattccgcttgtgtcccctgatacttttgcctcccaaatatttcctaacgtccacccccttctctgcagccattgccctcattcaggttcctatttctcttgctgtcatctgctgcagatctccctgtctccagccttgtcctaaaatcccaatttcaggatcctgctggagaaatctaattaaaatgcaaataaaaccacgtaagggacatttgagacattctgaagctacccagcatcttctgaatgtccacctggtgttgagatagtctcccattgtgcagtttctacctctccaggaaagaaaccagaagacattcatccagactcccttgctgctgggggcagtcatgtgactttggcttctccaatcatatcctctcatttgaggctatgatttgggagggaatatggaggcagcttagacagacagaactgaggttttcttaaagcgagggagtggaggcatctggttgttctggggtggcaggtgcactttctggtgtctagtgccccgtggtttggtgcaactcctagctgtgtgtttcctgatctatgcgctggccctttggaagagtctctgtgccacctactaccctttaatgaatttctgttttgcgtaagccagagtggattctgttgtttgcaatgaagcagactgattgttacagatcacatcactctcctatacaaactcttcctgtgtaaaagttttcattggttcccctgcctgcctgctcgcccccctagcctctccttctggtgccctcatttcacatttgtactccaaatatacaccaactgtatgctctgcaccgctcctccttttatgctattctgtgtactgaaatttttatcttactactggctgtgatgtgcccacttctcagaagagacagctgagtctcatggacatggtcacatggtgctgcagagccaggatcaggactcagtctcctgcccttccatcaaacacacgatcttgctttggagaaagcgtcaacaccactcaaccactttcaggctgaggccccttctcctttgtgctgaatgaaagatcctgttaaaccccctttccctgatgcccctttgcccacagcacatgcaccacaccatgcctaggctatgctccctctccaggctcaggcaccaccccacacactctcctttgcccagggagcttcctctgcccaaactgtcttccccatctctgtggtctggctttgaagccagactccgtgggttcaaatcctgactctgtctcttctgagattaggcaagtcactaaatctctctatggctcagttgccttgtctataaaattaagatggtgatggtagcccccttaagtgtgttgagtggaataacagaaaaacacggatgagtcacttagaagagtggctggcacttagtgcacacacggtcaacgttagctactattattattattaattgttttttttgagacagagtctcgctctgtcgcccaggctggagtgcagtggtgcgatctcagctcactgcaagctctgcctcccaggttcacgccattttcctgcctcagagtagctactcccagagtagctgggactacaggcacctgccaccacgcccgcctaattttcttttgtatttttagtagagacagggtttcaccgtgttagccaggatggtcttgatctcctgacctcgtgatctgcccgcctcagcctcccaaagtgctgggattataggcgtgagccactgcgtccggccgtcagctaccattattttttatcattatcatcatcatctggcaaagtctacatctgcccacctctcatggcccctgttccctccgggcatcctctctccagtgggaggaggaatcattgctttccacttgcggctcccagggcacctgcacctagtccttacttaaagcacatgccatgcctcttctgagtgctacaggcaggaagcagagtggatgcttaagaggctggactctggaaccagaaggactggtttcattccctggctgtagctgcttatgagctgtgtgaccttgggcaagtgacttaacctctctgtgtgtgcctccgtttcctggggaaaatggagatgataataggagcgatttcatggagtaggtgtggagacccaaccaatctgttcatcctttgtctggcacacgggaagcgatcaatacatgttggctcatcttagttgtttactgcctgtcttgcgctcaacactgtgggtgtcttcagggcacaaaccaggctttatttacctttgtgctcctggcaccccatgcagtgcctggccctgtgagttgccacgtaggtgccctgcacttgtggtctgctctcatgtcagttgtttctttcatgcctcccacctgaagggcactgtttcaggctgaacaagtagaagattgccgcccaccacacttaattctcttttgggctgctggcccaggagctgaagaaggcctagggcctgggggactgttagctgtggggagctggcacttctcgacaggggccttgcggaccacccgctttgatccttgatcgggagcatttaggacctcatttggactcattgcgaaggatgcctcacacagaaggccatggcatatgcgatctctcaggctgtgccagatggtggggctttggcggagctccctctgtatctgcaagcccgctgacccattcagaggctccaaactgcaagagagaaatgataatggtgctttgaaatgactggagctgggagatggcaaggagcctggcaaagaaggaacacaccgttgtcgctggtacttagctgtattcatggaccagcaaagcaagatggattccagccagcttaatgagccccctcggttagctgcctgattcattcaatttgaccaccatgcaaaagatctagaatagaacagtggttaagagatcgggacctggggccctactgcctgggctcagatccaagcttctctgcttaccagttgtgtgaacttttgacaaagaactttaatgctctatgcctcatttccttatctgcaagatgggaatatttttgctataacagtgggaggacatactggatcgacaatgctgtttgcctgtgtatcagtgtgacagaagctaactcttacacagttcttaccacattccaggaactgttcgtcacgtgggcttgctcatttcatccttacaaccaccccgcccaccagggagatgctattattatctctattttttaaaataagcaaagtaaagggagttgaaacaatacattcaaggtcacagtgcttgaaattcaaacttaagcagtctggcttacaattcatgttcttaccgtcatgctgtgctgcctgccaatatgatatagatctaatcaaagacagatagattcttgccctgaagcaagtgtttgtgatttactctgggagattaaaaagaagccgtgtatgcacaaacttaagacaaacacatgctatctgcttagttaactgatgatgatcaatcaagcttttctccctcaaataaatggaattaggatgatcttggctgtaagtaacagttaacccaactcaaagtgtcttcaacaaccatgactttgatgattagtattactcacctaggagttcaggtagctgctggttggttaatccaggggctcaaagacataagtaaagaacttagttctttctcattttgtgttctgcgatctttggggcatcagctccatccacaggccaacacttctgttgacaagatggctgatcacagttccaggcagttccagatgtgagaaatgtatgagagaggagagaggaggggttggtctttcttggttatcctcttagaagcctgaaaatattctctggaatcttccagaagactctgcattgggtctccttggccactatggggtcacatgcaccttcctagaccagtcactggcaggaaggtcagtgagggtgccatgattggtctcatctggtgccaactggatactggggagccaacagccctggccacggcacatgctttgtgcttttctactttcctccacttgcttcagccattcctcctgcagaatgcctggtctattcctacatatcataatggttcactgtctagaatcattttagttgcaagtaacaggaaatccaaccaaaggtggtttaaataaagaaacccagagacaagcagtcctgagccagtgctgtgtcagtcattgatgtatcaggggcctgggactttctgtcttagtgctctttatcctcagtgcactggttttcacccacaggtgcactgctgtctagttctaaaatggctgcttcacctccaggcaggaaagagagagaagggagttggggtaggaaggcattctcaggaaccctcctgcagctttctatttacatcttattagctggaactgggccatgtgaccactgttagctgcaagggaggctgggaaagtgaatgccttagctgggcactttgccacctcgaacaaagccagagtcctttggttagaagaaagaagaggatactgggcaactagcagtgtctgccacacctttctttaaggatcaactcacactgcacaccactgcatccttccctctttatccctagggcataggctgcctgtccccttctgagaaactaaagtgaaaaaggaagagaagaaaagaatctaatgaaatgatttacctatttcagctcgaaaccctgccatggtgctgcagacagagtatcttggtaggtcagggaaattgaggctcagagggcagtactgacttgccaaggtcatggttaactatgagactcagcaggaatgtgaatctgggtttgttccacttgcctgccctctcctctacaccgtgctcccatggaagccccaggtagcctgagtaagtggtcactgaatgctcatggaaagttctcctgttaactgggagggagataactcatctctcccagttataccgtacagtcctcaaggtcagaactgatgcctgtgctcccactacaaggtcgagaagcctgtcaagggcccatcacaattgcctcctagcagaggacaggccaggccattgtggactgtagttgacatgagcacaatttgcagattctttttgactctaaaaacccaagaacattgcttctgactgtggcgagaacattaagctttcaaataggcaccgcgctacgacagaagctaatgcaagccttgatcatttttctctttcctttccctcctctgagttctgctgggagccggttcgagggaagttggctaattggaactgtccacactgcccccatgagaaatgggatgttgtacaccatgttccctggagaaaatctcccatctgttcaccgcatgagaataattacatgtataaattaccgccttctcatccctctccggcttgtgttggagagggggtgtgcttatgatggaggttcctgagtgacctttttgatgagggaatgtgacgaagtcagctcctaaatcagccatctgcctgagcacgactgtggtattgattttctattctagggctggaaaacggacatttattttgaaatatgtttagtaatgaatctgtgatttgcgaagggtgcttctgcaacgattcctgctgaacttgatgtgacttccagcaacagagaaagtcactgggtttaattttaccctttattactaaaaggagagactccaggccgagcagcttgagaaaacgcaccaggtactttccacagcagtcatgacactgcctctcatggagaacctccctctaaatacctcaactgcaaaatatattacacaacattttctggaactgaaaagccctggcctgggagacagggtttgttggggggcagggatctaatcaccatcaatgaccagcgatagcaccgcaggcaattccttgcctcttccagggcctcagcgttcacactgcaggatggaagaggctattcagtttcaatgacctccatggtaaacagaataataactgccccacaagacggtctcatctgtatccttggaacctgtggatattccaggttacatggcaaacaggaggtaacgttgtagatggaattcaggtggtgtatcagctagctttaaaatagggagatgattgtggattatctgggtgggaccgaggtaatcacgagagtccttataaatagataagggaggtagcaccagagagctggcaccatgagaagaacttgtcctgacatgactgacatatggagggagggggccatgagccaaggaatgtgggtggctcctagaagctgagctaggcagggaaacacattcttccttagagcctctggaaggaatgcagccctgctaacccttccattttagcccagtgaggcccatctcagacttctgaaccccagaattatgaggtaataccttgatgttgtttaaaccacaaagttagtggtgatttgtgacagcagcaatagaagctttatgcaacccgtgctcctctagtcctggaatttgctgattgctctccacccatctgcagcgaacccttctcactcccctgctcaattctccctgattgagaattcccgtcttttgtctctccagccagactcaaatttccaggaggacatagatgctcctctttggtatccgtgcagtgcatcctacaaagtgcttgttcaggctccacagggcaaggtccagaattgctggaagtggcgcggccatgtcatccctggaagtgacgatgaaagccagtccttttaaggtgctcacaacctgccaggcgcagatagaggagctccccagccatcatctcactgcatctttagagaaacctggaagtagaattattagtgtcatcaccacttgacaaattaggccactgaggcacaaaggaagtgaataagctgcctgggtcacagagctgggcaatgtggtggccaggtttctactctcttgggtcatcagcccattggtttcattctctgtcacagacaatggaagttgtctctgtcttacgtaaggtcctgggcaaatgtggcatccagttaaggggaccacaagttccagtttacctgagacagtccctgtgttctagaataattattaatagtacctccccattcatactcaaagggggtctagtttgggaactgtgaatcgtatagtcagcctatgtccagccctccttccagtggtgacaggagcctcacggaagagcgcacaggggcagagtatagttgcaccccctggccccaacgggcacgaaatagagccctggaattgggcaactcacattcaagtcttgactctatgaccaatttgttctgtgaccttggggcaaacgtgatgcatttcatagcccctggcaggtttcccagcccgtactcggaaccaagtcatgggaatgtctgagaaattcaattgttgttttcctctgatctcccccagccagaatttcttcatctacaacacagagaggaaattacacagcctattggaagagaatggtgagttgggcgtggtggcacaggcctataattctagtgctttgggaggctaaggtgggaggatcgcttgaggccaggagtttgagactagtctgagcaacacagtgagaccccttctcagcaaaaatacgaaaaaattagccaaacgtgatggtgcatgtctctagtcccagctactcaagaggctgaggtgggaggatcacttgagcccaggagttcgagcctgcaatgagccatgatcgtgccactgcattccagcctgggtgacagagcaagactgttaaaaaaaaaaaaaaaagagaatggtgattgtggacatgaaaatgctttgaatgtcaagcaggaaggcacctgcaaacatgagctgggtgttttggggagacgacatatttgtggccaggtacgtagatgacctttgttccttacacttcatggactcttatttcctaaatgaaggtcaggaagaaacttcatttcctcatcaactttgcccaggtccttgtatacgaataggccacaaagtctatacactcaagtgttttcatgccagggttagacctgccccaccttgtcccagatgtgcttagccaactggctgcagagcttgcacatggggcttaacagtgaccttgactgggaacaggacccccgaggctgatgcttggacccacgctctccatgcaggtgctttgtattgactaggctttgtccctggaaggtggcctgttgtaccaccgtcatcttataccttaataattgcaacctctcctgatggaccaccctgtttcctttccttataaaatccattgtccacgcagcagagagagtgacatcagatcacgtcacattctagagtggccatttccctcttccctccttaataatcatcctgcatgctcatgagtgccctcagagtctgttttctgggactcttacttgtgacaacaccacattctctatgacattactcactccatttctttcataacttggaccacctcctgacactatattgttcatttactgccttgtacgtcctccatctgctctgtgagggagggaccctcttgaccttatttgttgggtgcctagcactgtacctggcatacggcatgtgttcaataaatgtcagttggaaggaaagaaggaagacagggagggagagaagaagggaggaagagaaggagggagggagggaggaagggaggcactctgatatggcgactttcttcagaaatgctgatatccagtgagtaggactagaattcaccactgtcatctccagtctgcagtttcaaaggaagccacatggggctgggtaagaggggagggccacagctggatcaatcattgtatagatgtggatactgtgatcggtatctttatctgggcatttttttctattaaaatttttttaaagtagtgtatttattctaggaaattcaggtgtagttttctgtcctttctctatgcatgcattagataaatctacctatccacaggtttttatcactgaatcacagtgcagttttaaaattttcacatcaatgcacacatttctgcagcatcatgtttacgggctgcacagcccctccattgtgtggttgtgtcgtattttttcactggtcccatcatttcatcatggtgattaagagaagatcataaatgcctgagttcaagccctggcccttccgcttactcactgtggaaccttgagcaagtcatttaatttctttgtgtcacagttataccacctctaaaaacgtgatagcaatagtatctacctcagggttttttttttttttttttttgagaatgggaagacttaaaatatgcaaagagtttagaaaagggccggctcatgatcccctaagctctggccccagatgctcctttcttccctctctgtcttccttctgtaggtgctggtctatgcctgagaccccagtgaccactgctgcctctctgactcccaaaaagtcacttccagttgttctcccttatctgagtttcagatccatgtattcaactgcatattttgtttttccctctggttgcctctactttattaactcttcctttcacccatctacccatccacccacccatccaccacccaccatccacccaccccttcacccttctactcactcacccacccatccactcattcatgcacctgcctatcgccccatctgcccgtccatctgcccattcatccattcaccagattaccaccatgctctacagcctctcattggaagaagttgtacgccaacattccttgaatagattacaagagcccaaatgatcagctcccaatacttcctgacttcatctcttgctactcttctccctcacttgcttagtttcagccacaccagcttccttgaggatcctcaaccactgtcaggcacacaactgccacaggggctttgttcttgccttttccttgtttccttgcctggaatattttgcctaaattatccacataatcacctgctctcttcctataatgctttgctcaaatgtcaagttctcatagaagctttcctgacacccttccccacttttttagaagcagggtctgtctctgttgtctaggctgcaatgcagtggcatcatcacagctcactgcagccttgacctcctgggctcaggagatcctcccacctcagcctccagagtagaggtgtgcaccatcatgcccagctaatgttcctatgttttgtggagatgaggtctcattatattgcccagggtggtgttgaactcctggcctcaagcaatcatccctctttggccacctgattagccggtactagaggtgtgctaccatgtctggctaattttacaaaaatatttgtagagatggggtcttactatgttgcccaggctgatctcaatctccttggctcaaaaaatcctccttcctttgcctcccaaaatgccaggagtacaggtttgagccaccatgcccagcctgacctctctttttaaaattgcaaagtactccccgcaaactatatctccatctcttcccttattgttcttcataaacccaaacacaatctgacatgttgtgtatgttacttatctatcctgttcctactctgtctgccctgctagaaggcaagcctcataagggccaggagttttgctctttttaaaaactactgtatttctggcaccgggaacaatatctgtcatatagtagccactcaatgaaagaaagaatgaatgaattcaggcaagaaatggtaccttagagtaagtttatgaaattgaaaaatgaataaatttcagagatatcgaaagaaaagtttcccattattgtttcttatatccaataaactttttctttgtgccttccatatttatgtttacaaatcccccaatattatgtaaaattcatttatttccttccaggacttacatgttttctacacttaatttaccaacatatccggagtgtattttgatgtacaaatgagatacggatcagatttaatatttttatctagatcattaagcaccttcaaaatgatctgaataccatttattgaataatccatcttcctccaaataatggaaatgcaacctttatcacattgcaaagttttatatctgcaggtctttttctgaattttctattgagttttcttgctttgtttccaatcagcctgacacttcagttattacaattccgtgtgtgagaatacctggtatagctaaatccataatttcttttcttttctaaaaaggatttttttatgacttaagttttcaaattcactatagaccatttccctcatgataatttactggaatttcacattttatagattgagaggaaggaaataggtatcaagtcaatattaactcccatgctatgcatgttattatttgattttttgtttttatggttttattcatatggatcccaaagacttgctataataatatcaaaatgttgtatgttgcagtttaaaattggatttgtttctgtttgtggtttaactaccattctttttgcttttgttttttttgagacaggttctggctctgttgcccaggctggagcgcagtggcacaatctctgttcactgcaacctctgcttcctgtgttcaggcaggctttctgtctcagcttcccgagtatctgggactacaggcacgtgccaccatgtccggataatttttgtgttttttgtagagatggggtttcaccatatagcccaggctggtcttgaactccaggactcaagcgatctgcctgcctctgactcctaaattgctgggattacaggcatgagccatggcgcccggccacatgctaattgtgtagcccattggaattctggccacaattacaagctccaaaacttcttgtagattctcttgggttttcctagtaggtcatctgctaatactctgttcaaattcctgcacctctcactctctgcctgagcatctgggtactgaccatgtgctgccctgtgacacttttcccatcactatcctgaatgtcacttggtgccactctttctgttcagcaagttacatgtttgtgtcttggatctacatcttgattttaaggttctgtacatccggcccagagctgcccacactgcagccacctaatcaataagtgttgatttatctgattaaagagcaagactagaggtaagaaatccatgagctgagttcttcctctcatgtactgagagcgttctgagtccggatgtgtcacaggcgatttttcaaatagtaggcaaaatttggaatctggctaagggttcagtccttaggaacagcaagccttgtgtaatactcatggtgctccaggtattggtctatggactttatgtatattaactcatttaatcctcagagcaatctgatggaatcggtgccattattgtacccgtttttcatgtgaagcttttaaacacagagaagttaaatcacttgtcctaggtgacacaggtacaaaaagacagccaggattccaaccgaggcagtgtgtctccagaattcgtgttcctaaccatcacacctactgtctcttggagggatacatgtacaggttttcatgttggtctcatcagtacaacctgttaggcaacctcctgactttgaccttttgggtgccaggcagttttcagtccaacccaacatacctcttcagtctattctagtccccgttttattctctctctccacaaacagcctagcctgcctgacctggaaacaaagactttctcctatttttcagggccccatttctaaggcaccagctggagctattgtgtaattagagcagaagtttaccctacccccacagagcttgggtcgttctgtaaaatcattattaaatgactgcctttatagggccctgggcagaagtaagaattacagggctcttgataatagggaacgggatgccaagcagcatggcctggctgcatgtgcagcacttggtttcaccaccagctgatcaacaggttgccagtgaccttcctggtgatgtgattgatcacagaggtggtgggtcttgtggggaatgccagctgagattcccagctggactggtttgtctaatggttctgatttcctgttgtagaaaacaggagctaatcaaaggcttggctgttgatgcttccagttaagcagcttgaagcaccggggagcatcccatgtctcactccacctgcatcagggtctgtcaacctggtgataatccatgtatatccaggtcttcaccctaatgcagataaacactgatctgtgggcagcatccactttatcaacctggctcagtcaatcctgaagaccctcttctattctagaacaatggagcaggacaggatattggagatcaagttctttaatccatatttttactgacaagcaaaaggttggaccaaataggcagggatgaaggtagatggaggggtatagagccaaactggctttctgcaataggaaattggaatatgtaatgcccagagctgccctccccagtcttttcctaaaaacattggtattttcctttttttttttttttttcctgagatggcgtttcgctcttgttgcccaggctgcttcaacaaaaggttcaagaggtggagggctagtcccaagaccacacaggaagcccatctgagaagatctgatcctctcttcctgggggatcttctccaagataaaggctttaaacatctctatgcgcacagctcccacatttgtatctctggcctgaaattcccctggattcagaactcatgcactcagctgtccagacatatcaagacttaatctgttcaaaatgaaactctttattcctgtgctacaatctgaatgattatgcactcccctcccccaaatttatatgttgcaatttgaactcccaaggtgacggtatagaaggtgggcctttgggaggtgaataggacttaggggtagagcctcgtgaataggactaatgcccttataaaagaaacctcaagggagttcattcacccccttctaccaggcgaggatacagggataaggtgctaactgaaccaggaagcaggcccccgtcatccactgaatctgatgacactttgatcttggacttcccagcctccaggattgtgaggaagaaatttctgttgttgacaagcttcccagcctatggaattttgttatagaagcctgatcagactgagacatcctctgtctaaacctacttcttctgcagcctttcccatctcggcccaagcaagtccattcttccaggtgctcaggaccaaaccctgggcaccatctttctcttcttcctttctcttatatgccacatccagtccacctggaaattgtgtaggctttatcttcagaatatatcctgagtccagtcacttctcaccacctccactgctcccactttggtccaagctactattagctctcatccagtttttgcaacaaccccctcactggtctctcacctcctgtcctccacctgccacccccatcctgacctcttcgccttgtcagaacattctgtgtgatacattgatacacagagcagactcatgattcatctgcttataatgttccgctgatttcacatctcattctgaaggaaaggtgatgggggagaggaagagagcaatgggcaagagttcagagaactggctcccatgccaccctcatccctgactctggaaaagtgggcatctatctccatgacccagtttcctcttcatatggtttgactctgtgtccccatccaaatcttatcttgcgttgtaatcaccacatgtcaagggagggccctggtgggaggtgattggatcatgggggccatttccccatgctgttttcgtgatagtgagtgagtgcttacgagatctgatggtttaaaagtgtggcacctcccctcttgctctgtctctcctgtggccatgtagagtgtgccatggccttctgccatgattgtaagtttcctgaggcctctcaagccatgtggaattgtgagtcaattaaacctcttttgtttataaattacccagtctcaggtagtatctttacagcagtgtgaaaacagagtaacacacctctcatctaagatcccctcttgttttaagttgttagatgtgtatattttaagaggtggaggagtcagcagtctgtgtatccccaaaactctcctgcacccctctctgactctgcttggacctgtccttcctgatccactctccagggctcctggcccctttgccctcatcccctcctcctccggcttcacaaagatccatcattccttgcaggcctctgctgattcacaagctcccagagactgtggcaacagctgcctttgaaatattgaaaatgaaaaaaaaaaaaaaagcttttcaaaaagtaaacaaatgcacaggagagtgggaaggagttctccagcgggaagtggttggtgactatattgatacaagggaggtgaatttattttcttttttctattttttttgagacggagtctcggtctgtcacccaggctggagtgcagtggtgccatctcggctcactgcaacctccacctcctgggttcacgccattcgcctgcctcagcatcctgagtagctgagactacaggtgcccgccaccacgcccgactaatcagctaatttttaaatatttttagtagagacagggtttcaccgtgttagccagggtggtctcaatctcctgacctcgtgatctgccagcctcagcctcccaaagtgctgggattataggcgtgagccagtgcgcctggcctgtgaatttatttatttatttatttatttatttatttttatttttttcgagacggagtctcgctctgtcacccaggctggagtacagtggcatgatctcagctcactgcaacctccacctcccaggttcacgccattctcctgcttcagcctcctgagtatctgggaccacaggcgcctgccaccacacccagctaatttttcgtatttttagtagagatggggtttcaccgtgtcagccaggatggtctcgatctcctgacctcatgatctgcctgcctcagcctcccaaagtgctgggattacaggcgtgagccatcgcacccggccatgaatttattttctaaccaggctatgcaagtgcaaaaaccaagccaggcaatgagttcacaacatcctaaaagtaatatctgactatgtggaaaaggattaaagtctacatttactcaggattctccaaaacagatctgaggcagatctccaaaccattacctctggatccctcccacctgctatctacttaagttctagcctctctctcaagccccagactttatttgctgtccatttaaacctggaagattcaaacaaaattaccttttctttcccatccccgatacagcgtctccccagactttcctatttccatgcagaccccactatcctgtgagttgtccaggttcaaagacattcctgtcatctgtggctccctgggggttgattaggatgttttgggcaactgggaacagcacctcctaccatcagcagtcagaaaataccaatgctggctgggcgaggtggctcacgcctgtaatcccagcactttgggaggccaaggagggcggatcatctgaggtcaggagttagagaccagcctgaccaacatggtgaaaccctgtctctactaaaaatacaaaaaaaaaaaaatagctgggcgtggtggtgtgcgcctgtagtcccagctactcaggaggctgaggcatgagagtcgcttgaacctgggaggcggaggttgcagtgagccaagattgcaccaccgtactccagcctgggcaacagagtgagactctgtctcaaaaaaaaaaaaaagagctttacttactctaaataatattttgtgtccatatctacacatagataacaacaaatcactatcatttttggtatgggcatgtgtagatataagtattaaatcaatttcctaccttttatccagttatggttatatcccctatcagtgatgtaacttcagccaagatagaaatttatctcacaaaaagcaagactgggatgggtgcaatggctcacacctgtaatcccagcactttgggaggctgaagcgagtggatcacttgaggtcatgatttcgaaactggcctggtcaacatggtgaaaccccgtctctactaaaaataaaaaaaattagctgaacatggtggcacacacttgtaatcccagctattcgggaggctgaggcatgagaatcacttgaacctgggaggcggaggttgcaatgagctgagatcacgccattgcactccaccctgggcaacagagcaagactctgtctcaaaaaacaaaaaagtaaaaacaaaactggaagttgtcagtctagggtggcgttagggactttcatttccttccagaggacattctgctatccgcagggtagaagcctaatcctcaaggttcaaggtgacaagaatagctccaaccatcatatgcttattccaggaagcaggtcaaaggatgaacaactaagaaatgacactaaagatatatgtcagcccatctgcattgcctaaaggaataactgaggctgagtaatttatagaagagaggtttaattggctcacagttctgcaggctgtacaagcatgacaccaccatcaactcctgaggaggcctcgggaagcttccaatcatggcagaaggtgaaaggaagcaggtacatcacatggcgagagaaagagcaagagagggaggaggacatgccaggccctttaaacaaccagatctcccataaactcagagcaagaactctgtcattgccactgggacagcaccaacccattgtgagagggatctgcccacatcaccaaaacacctcccaccaggccccacctccagcatcagggatcacatttcaacatgagatttggaggggaccaacatccaaaccatatcaagacagaagttacagaaaggggtttccaaaaatgccacccaatacttttattacctcccattggccagaacctggtcacatggccacaactcatggcaaggaagcctgggaaaatgtagcctgtgcccactcactaggagaggggagcactggtgccagggtgcaggaacaccagtgggcattcatacttcctacttcgtcttataaaaatccttagagattcatctttgtgtatttttctgactatttcctagggataaatgcctataaatgaatttgggaccaaaagttatgcactttcattggccaattgccaattgccctctagaaagcttgtactaattaactcacacaagaggtggggttctatttcatgaaatgtttctccaccccatatttccttttaatccacaccctttggtctttattaggcttacacatctcttcagaatccctgcttcctacattataatcttgggatttaatacatgtttttcattcaggttattatcaatatcagatttatctgactatgcatgaacacagccacagattcagggaaaaagatgtatctttcagcgctgaagagaataaaaattaataatcctcagagactttcaaactgaagtgggcagggaagggtggaaagaaccgatctcattctatgaagagcatgcagggattttcacagagcatgtagtgctgagtacagcacaccaggcacccggggacacccagagagcagcctttcctcaacacaagaggagtgagcaccgcacagagctgcagaaagggaatcccagatggggtaacagcagatacaaagaccccacggcaggccctggcctggcctgctggaggagcagaacggaagccagtgggtctggagtaaaggggaccaacttgtcccggtttgcccagaactttcctggttttaacactagaaatcccatgtcccaggaaacttctgagtctcagccaagctgggatgatttgcctagaacttcccctattataaaactgagaggtctgtgccccatcatccgcctcagtcctaagcaagctgaggcagtgggtcgccctagactggagcaacgtgcatgatggtgggaagagccagtgactctctttcatgtcctctctgccctcgatctcaggagtcacccaggtgggcactggcatccaggatgaaaacttcccagcaccccagcagtggccacgtgaccaggcagtggccaatgcacatgaggccagtgcacagcaactgccattagaggaaggaagatttgtgtcctcttgttctcttctcccctccctgctggctggtagtagataggatggacactgtgggggaagctacaccctaaagaagtcaaagcagcaagatggaagtaccctaagaccctgaaaaatgcacagagaagaatcacccgactggcttgaactttcatgtgaaaggaatgaacctctgtcttagtaaagccaccgtgattcagggtccttgtgatattcactgaggctgtaacataattgttgaaagaacaggagcgggaggggagatggagtcggagaggcaggcagaggtcagatcacatggggcctgtaggccaaggcggaggaagaaacaggtgacataggactcaaggaccccacctgctcccaggcgaagggagtttgctgtgggtgcccctccctgtctgtgtgtccagtgtattcatattcttcataccttgcccatattggacaaatacttttttctattcaatatttagaagacattgcattaaatagcaagatggcaggtgaacatcaggaaggaacattaggaacatccacggcgttccatccaggaaccttcaccgtggaaactcttgtgctcatgggcgtggtctcaagacacagtcagctgttggggatcagaggcgacactcattgtagcagagaggcaggaccaactgggagagggtccttctgtgacaactattgcatcaccgggctgtgtgaagtgactcagctgccagaactcacacaatatcattctacaccaaacctcacgggaaaaatggtaagtttaaagttttttcattaatagcaactctcagattaatctctgtcctccatcgcttctccatgaaacaactttttatagctttggttgggtctatttttccatttattttttattttactaactgatttaaagatatatattttgtgtgtgtgattttgtctctgtcagccaggataatcatgttttaattcctattattattattaccaacatcctttagtttttttagcttttcaattcctaagggtattaatcaggatctttctgtctcgtgagatggaaaacaaatccaaactgtgtaagaggaaaaagaatgcactgatcactagcattgagaagttcccaagcttagcttgcttggggtacagctacgtctaccatttccagggtcatcctgtaactctctctctctacttccccaactttggctccatgtttagctccacgaccctcagacttaaacagcagcactggctcctccccagatctccagctccctgaccctcaaactccaactccaacaccagctctgccccaggtctccagctccacaatcctcaaactacaacagcagcaccagctcccctggggatctccagctcaatgactctcagacttgggaggcagctccagctcccaccaagcctccagctccacaaccttcaaactagaacagcagcaccagctactccctgggtctccagctccctcaaaattcaactatagcactggctgttccccagcgccaccagctccacaaccctcaacttacacggtggtagcaccagctcctccctaggtctccagctacacgaccgtcaaacttgaactgcaacaccagctcctcttcggcctccagctccacaatcctccaacaacaacagcaacaccggctcctccctgaatctccagctcaacaaccctcagacttgagaggcagcaccggcacctccccaaggctccagctccatgaccctcagatttgaacagcggtagcaccagctcctgtccaggtctccagcttcatgatccttaaactagaacagcagcaccaccacctccctaggtttccagctccacgaccctaagacatgaatggcaggaccgggttccccgctagggctccagctccaagacccacagatataaacggcagcaccggctcttcctgggatctccagctccacagccttcaaacacgatcagcagcaccagctcccctctggttctccagctccacaatcctcagacatgaacagcagcacaggctcctccttgggtctccagcttctctaccctcagactagaacagcaacacttgttcctccctgggtctccagctcttacaagtctcagacttgaaaggcagcactggctcctcagaaagtttctggctccaagctggtgctgctgtcctagtttgaaggtcatggagctggagacccggggaggaaccatttgaacagcagcactggcccctccccgggtctcaggctccacgaccctcagacttaaaaagccgtagtacgggcttctccctgggtctccatctctacaaccctcagacatgaacagcagcagcaccgccccctccccctgtctccagttccacgaacctcaaactacaacagcagtaccggcctctccccaggtctccagatccacgaccctcaaaatagaatggcatcaccggctcctccctgggtctccagctcccaaactctcaaacttcaattgacacaccggaccctccccacagttaaacagcagcacgggctgttccccaaagctccagatccacgaccctctgacttaaagggcgatagcaccaactcctccctaagtctccagttccacgaccctcaaactacacagcagcaccggctcctccttgggtctccagcttcactacactcagactagaatagcaacaccggttcctccctggaactccagctcaatgactctcagacttgaaaggcagcaccagctcctcaaaaaggttctggctccaagaccctcgaactagaatagcagcagctgctgcatcttgggtctccagctccacaaccctcaaagtagaaaagcagccctggctcctccccgagtctccaactcctcaagtctgagggttgtagagctggagacccggggaggagtcagtgctgctgttctagtttgagggtcatggatctggagacccagggtggagccggtgctgctgttctagtgtgagggtcatggagctggaagaccccgggaggagctgctgctgctgttctagtgtgagggtcatggagctggaagaccccgggaggagctgctgctgctgtcctagtttgaaggtcatggagctggagaccccggaatgagccatttgaacagcagcactggcccctccccaggtctcaggctccacgaccctcagacttaaaaagccgtagtacgggcttctccctgggtctccagctctacaaccctcagacatgaacagcagcaccggctcctccccctgtctccagttccacgaacctcaaactacaacagcagtaccggcctctccccaggtctccagatccatgaccctcaaaatagaatggcatcatcagctcctccctgggtctccagctcccaaaccctcaaacttcaactaacacagcagatcctccccacagttaaacagcagcacgggctgttccccaaagctccagatacacgaccctcagtagcactggctcctcccaaggtctccagttccatgaccctcaaactacacagcagcaccggctcctccccaggtctatagctccaccaccctcacactagacatcaagactacctccttcccgctctccagctacacgaccctcaaacttgaacagcagcagcagctcctccctagatttccagctccatgaccctaaacctgcaacagcagcaccagctcctccctgtacctcaagccccatgaccctctgacttgatcaacagcaacagcagctccctccctggtctccagctccacaaccttcagccttaaacagcagcagcaccagctcctccctgggtctccagctccacaaccctcagactagaaccgcacccctcctccctgagtctccagctccatgaccgtcaaactacaacagcaacacaggttcctgtctggatctccagctcagcaactctcagatgaggcagcaccggcaactcaccaaggctccagctccacaaccctcagatttgaataatggtagcaccagctcctgtccagatctccagcttcatgatccttaaactagaacagcagcaccgctgcctccctgggtttccagctccacgaccctaagacatgaatggcagaaccggcttcccacaagggttccagctccaggacccacagatttaaatggcagcactggctcttcccaggatttccagctccactaccctcaaactagaagaggagcaccggctcctccctgggtctccagctcccaaaccctcagacatcacctgacacactggatcctccccacagttacatagcagcacgggctgtccccgaaaactcgagatccacaaccctctgacttcaatggcggtagtactggttcctccctaggtctccagttccatgaccctcaaactacacagcagcaccagctcctccccaggtctacagctccaccaccctcacactagacaccaggactacctcctccccgctctccagctacacgacccgcagatttgaacagcagcagcgtctcctccctgtacctcaagccccataaccctcatatatgaacaacagcaataccagctaatgcctagggctccagctccaggatccacagatttaaactgcagcaccagctcgtccaaggatctccagctccaccaccctcagactagaacaagacctctactccctgggtcgcgagcttccggaccctcgaactatgaaaacattgctcctccctgggtccgcagctccacgaccctcaaaccagatcaagatctctcctccctgtgtcgtcagcttcctgacccttgaactatgacaacattgctcctccctgggtcagcagctccacaaccctcaaaccagatcaagatctctcctccctgggtcgccagcttcctgaccctcgaacaacagaaacattactcctccctgggtcagcagctccatgatcctcaaactagaatgagacctctcctccctgcgtcgccagcttctggacccttgaactatgaaaatattgctcctccctgggtcgggagctccatgaccctcaaactagaacaagacctctcctccctaggtctgcagcttccagtccctcaaataacaacattgctcctccctggatctgcagctccacgaccctcagactagaacacgatctgtcctccctgggtcaccagcttccgaaccttcgaactaaaacaacattgctcctccctgggtctgcagctccacgaccctcaaactagaaaaagacctctcctcactgtgtcgccagcttctggaccctcgaactacaaaaacattgctcctgcctgggtctgcagctccacgaccctcaatccagatcaagatctctcctccctgtgtcatcagcttcctgaccctcgaactatgacagcattgctcctccctgggcgcaccctcaaactagaacaagacctctccaccctgcgtcgccagtttccggagcctcaaactaaaacaaccttgctcctccctgggtctgcagctccacaaccctcaaactagaaccagacctctcctccctgtgttgccagcttcctgacccttgaactatggaaacatggctcctccctaggtctgcagctccacgaccctcaaactaaaacaagatctctcctccctgggtctgcagctccacgaccctcaaactaaaacaagatctctcctccctgtgtcatcagcttccagtccctcaaataacaacattgctcctccctgggtctgcagctccacgaccctcaaactaaaacaagacctctcctctctaggtctgcagcttccagtccctcaaataacaacattgctcctccctggatctgcagctccatgactctcagactacaacaagatctctcctccctgggtcaccagcttccggaccctcgaactacgaaaacattgctcctccctgggtctccagctccatgaccctcaaactaaaacaagatctctcctccctgtgtcatcagcttccagtccctcaaataacaacattgctcctccctgggtctgcagctccacgacccttaaactagaacaagacctctcctcactgtgtcgccagcttccggacccttgaactatgaaaacattgctcctccctgggtccgcagctccacgaccctcaaactaaaacaagatctctcctccctaggtctgcagcttccagtccctcaaataacaacattgctcctccctggatctgcagctccacgaccctcagactagaacaagacctctcctccctgagtcaccagcttccgaaccttcgaactaaaacaacattgctcctccctgggtccgcagctccatgaccctcaaactagaacaagacctctcctccctaggtctgcagcttccagtccccaaataacaacattgctcctccctggatctgcagctccacgaccctcagactagaacaagatctctcctccctgggtcaccagcttccggaccctggaactacaaaaacattgctcctccctgggtctgcagctccacaaccctcaaactaaaacaagatctctcctccctgtgttgccagcttccggaccctcgaactatgacaacattgctcctccctgggtctgcagctccacgaccctcaaagcagatcaagatctctccttcctgtgtcatcagcttcctgacccttgaactatgacaacattgctcctccctgggtctgcagctccatgactctcaaactagaacagcagcaccagctccttcctggacctccaggtcaatgactctcagacttcaaaggcagcagcagctccacccccaggctccagctctaaaaccctcagatgtgagcagtggcagcaccagctcctttctgcgtctccggcttcatgatccttaaattagaacagcagcgccatcttctccctgcgtctccagctccaggaacctcaaactgcaacaggagcacctgttcctctgggattttcacctccacgaccctgaggtgtcagtggcagcactggctcctcccctgggctgcagctccagaaccctcaagaataatcccttctcatgaaatgtagcagtcaggaaaactgcagaggaagtaaataaataaatgttttctttcaaactgatgtttcttttatattcacacaagtcaggaaacttttctactttccatcaaccttacaatctacttatattcaattgtaaggtggaaatccaccatttgaaataacctttaaaaacttagtaactctcttttactatgattttatctcacagctctagaaacgatctttcactttgcctgtgcagaagtcttgtgaacattcaaactagaatttacttggttgagattctagaatacacgttatccccagatgttcctgccctccttaaaatcttctaacatgttcccctcacccgagcataaatgccaggtcctatccacagcccacagtgcccagcacggccctgccctctgccctgaccttatggtctcccctctgctgttactttcctcccagacaggcctctgtcacttcctgaaaccacacaggctcaggcctgactccgggcctttgcccctgctgtgccccctgcgtggagcgcctttgcccggctccccatcctcctctccacccgctcagctccagcctgctggctgcccctcagtccccgcccctcagcggggaggacatccagaacacacgatgtcctccccgctaggcctttgcacatgctgttctctgtgcctgaaacccctcccccctcaccatctgcgttcacttttctaatttccattcatccttggagtctccactgaaatatcgcccccccgcctgcccccaccacttggacttaaccttgcttaggttgaaaacccccatctcctgagtccaggaagctagatgctgtcctggcacttggaactttcccatcacagcgttttgcgcactcgtaatttattctattaggttggtgcagaagtcatcgcagtttttgtcattactttcaatgaactgcagcgccggctcctccccacttttgattgccattacctttactggcaaaaaagtgctggaattactgctgcaccaacctaatagaataatttatatttattgatccatcatatgtcttcccctctagaaaataagctccataagaatagtgaccaaatctactccaatcactccagcttccttgcacattgtcaataattatttaccgactgactgatagagaaatatcttcattgttgctgggatgagccacataacatgacacgcccctttgaaagtcaatgtcatggacagttagcatttgcttttcactcctgcacccgtggcttggctgggcttaggctgatctagtctgggcttgactccaggctgagggttggaaccctgcgtgctccacatgcctctcatcctgcagctggagccaaagttccctggggcacgctcgtctcgtgggaaaaatcaagagcattagagggcaggcctggcagtgccgacacattccaggcttctgcctgtgccgtgtctacgaacatctcattggcataagcaattcacccagacacgagcaatacctccatctcaaaagataggaaaagaaaataccagtgtttttaggaaagaaaataccagtgtttttaggaaaagactggggggtggggtgcagatctgggcattacgtattccaatttcctattgtagaaaatgggagctaatcaaaggcttggcttcaatgcttccagtttaggatcaaagccaaaacaacgaaataggggcaattcaaaggaacaccctctttacacctgttatttttataagaaatgaaaacctttcttaggagacctgtcacaatcctcttcggtcttttgggccagaatgagtcatagggaagtcctcactgtaaagggagctgggaagtatctggcaaaggtgactggcatagccaaggctggttttgaccaattgtgatccatttccattttgcctagaaaaaaatcctgttagcaagtagggtggggacagctgttgggtgagcaaacatcagcacctcctactttatcttcttccaccgccagcatccaatccaggggacagcctgttgttccctccctcagatgcctcctctattggtcagcttgttttcttcctatgcctggtaccttcattggcattgcaccttctctagcctggaccataattgcccttaataccctacctcctgtcctttctctttcaaaagactgacagatacctgatctctcaagtacaattctaacttgattactccagcacccaactatctttgataactctgtctcatctgccaagttatatacaaaccttctcagggtgaaaaccaaggccttccataatatgatcattggtaagggagaaaaaaaaaaaaaacagtcctgtttgcatctagactatggagggaactgagaaacacaaccctccaggccatgatgctcctgagtcgacatgaaccacactcaaagaatatgaactcgttcagacaaggccacaagttgactgtgtttagaggtaggcagggataagaccactctgcagccacagaaatgactgaacatgccccttttctaacatgagtgacagctgcctctttaccagtgacaactctagcctgcttcaagcttcccactcctgagataaagtatttaagatacgcaatcaccaagttgccctcacttcttgaccttgcctccttaatccctttttggaaccattctgtagaagcctaggtcctctaaaaagcactgccccttcccccttactgagatgcccccaggtggccatgggcgtgggaatctccctgactgcagcaagctaaataaactgactgtgactgcagggaagttcctggcagtcttaggtgggtgggctttaacatcatgatctaactttacaactttacaactgttccccaatagcttctttatagttcagacttttttttttttttcacaatcacacttaattctgaacaagttgctggatccagctgctattttgcaagaaatacacaggacagagacaggaatgtgctgactgcaccataaattcggattcgccaaaatccagactgtgaaaatctttataggtcacagggttcaggcactgtgacaaagaagttttaagaaaaagacaggcatggaagggaaatctggaaatttaagagacttaccaagatttaccaaatgggtaacgtgaactatgctgtctagggagccacatgggggtgattaagccatgcagattgtagggaggttgttgactatgagaatcagcatgagggttacttttggagggaggaagggacagactgtgattgggatgcagccgtgaaggggactctggccaggtgctctttcttgacttagtcttggtgataagaatatttgtgtataatatctcactaagctatacatttttgtgttttttttgtacctgtgtttgattttaaaataaaaaggctaaaaagaatatccttgaacagtttcatttctgtacataggagtctatagacaagggaagcaagaagtcaagttagggagctgtcagcaaaccaggagaaggatgatggggcttaacccacgatgacagcggcagagaccaggagttgcattcagattccaatgttttggaagaaagaaccaacaggagcctctgacacattgaattgaacatgggagaagaaggagaagcaatgttatactgtcacctctttctgactttattgtgaacctggtgaacataatggccaatcaaagacattggagtggatgagatgaaggtttcacaaaagtactaaagaaaaagctattgtctatgggcagatgacactagtccagggaggaaaaaaacggtagcgagtagatgttcttttccaccaaaaggtatcgtgcctatcgtggaagctcctggtagacatttgctggaaacagcatagcccagagacattggaataaatttgagatgtcttgaaactataatacccaaatctgactatctgttcagtgctgaaatctgactatctgtcatatttgggtattatagtgtcataagtgagtgtcataaaatgagttaggagtgtttcttctgcctgtattttctgaaggtgcttacgatcgatgttatttcttaaggagggctgagattgtcagcccaacacttcagatatgcattgcccttggggcaatgcccttgatggggcatcaagaccccgtgtctatttcacttccgaaattcaagataaacaaggcagccttttgttggagctcattgcccatttgttgaattgaataatccatctctcctccttaaaaaagtcaagttcataaaataaggaagcaagacttctaaatattttatgggaaaagattgtcaataaccaactcttttacattatttttataggtcacacttaaattggcaaaatagcaacgtgcaggtatgtgtcttatgaacgtctgctttttagcaatgagaatcctattttcctactggcttttgttattatttctgacacgtctaacttagtttttgctctcttactagctatagggttttctcactctgttgctcaggctggagttcagtgccacaatcacagctgcctgtcaccttgaactcctgggctcaagcagtcctcccacctcaacctaccaagtgcctgtagtagctacaggcatgcaccaccactcctggttaatttttttgtttttaaaaatagaattgggggtttagccatgttgcccaggttggtctcgaactcccatcctcaagtgatcctcctgcctcggcctcccaaagtgctaggataacagatatgaatcaccacacccagcctgtggtaatacaatttttaagccgacattttcctggactaaaggagctgttgaagtctagactcctaggaaaatcctgatgtcctgcttataaatagacatcctatttgagctgagttattttgcagaaaggctgcctgcagctttaaatgggctccccaacctcagattctgggaagttggcagccagctgcactaggagtgagttatgatgtcagctttccagaattcctaatgaactccagagcaaaaaatgctgttgctctgcctcccccaagtcacatttctagttgattaacgagcaaaggagtagaaaaatctatagctttggagaaggaggaagagtgaaataatttctcctctaagaaaccacagtgccccgattattttatttgttaagaaaaaggaatttcattttctatttatttcctcctttaaatctagattcagacccccgcttcccccttcccagtcataaaaagcaggtttggctctatacccctccctttaccttcatccctgcttatttggtccaagatagaaaatccagccctgcccttttgggggcagttgtcttagctctttgaggtctgtttaaaatctcatctagcatacataaaatagatctgcaaccctccattaaaagtcatggcctcctggctgcaaagagatacatccgggtgaaagttgtggttggttatgtccagctcagcccttctgtggccctgccccagcatgggctgaacatcttcccaccagctgggacatccagggcagctgatcttttaggggaaaatcactctgcacaattaccctgctccatatcccaccttctgtaaggctgcttaggctaattaaaagtcatgcttctttggagaaatgtctattgaaatccttagccattttttaattgggttattagggattttttgctataaagttgtaggagttccttatatattttggaaattatcccttatcagatacatagtttgcaaatattttctctcattctgtaggctacctttttactctactgattgtttccttcgctgtgcggaagctgtttagtttggcatcgtacttgtctatttttgctttagttgcccatgcttttggtgttgtatccatgaaatcactgccaagaccaatgtcatgaaattttcccctatgctttcctctaggagctttatagttttagatcttacatttaaggctttaatccatttttaggtgatgtttgtaaatggtgtaagacaaagataaggatctaatttcattcttttgcatatgtatatccaattttcccaccactatttattgaagaggctatcctttccctattgtgtattcttggcacccatgttgaaaatcatcctaccatatatttgggtatttatttctgggccctctattataattccattcatctataggtctgtctttatgccagtaccatactgttttaatgactataactttgtaatatattttgtgatcaggaaatgttatgcctctggttttgttcttgtttttcaagattattttgggtattctgggtcttttgtggttccatataaatttctgaatttttttgtatttctgtaaaaataaaattccatgtgattttgatagggattactttgaatctgtagaatgcttagggtagtagggacactttaacagaattaagtcttccaatccatgaacatgagacatctctccatttgtttgtgtcttctttaatttttctcatcaatattttgtagttttcagtgtacagatctttcacttccttagttaagtttgttcctaagtatttttttaatgctattgtaaactggattgattttctaatttccttttcagatagtttgttgtgagtatatagaaacacaattgatttttgtatgttgactttgtatcctgcaactttactgaatttgtttattaattctaacaggttttttttaagagtttttagggttttccatatataagatcatgccatctgcaaaagggaaagcttaacttcttcttttccaatttagatgccttttatgtctttttcttgacttgttgtgttggctaggacttccagtactatgttgaatagaagtggtaagagtaagcatccttgtctttttcctgttcttcctggaaaagctttcagttttttaccattgagtgtaatgttaactgtgggcttttcatatatggcctttattatgttgagttaataatttttctctatgcctagtttttgagtgtttttatgataaaagagtgttgagtttcatgaaatgctctttttgtatcacttgacatgatcacgagatttttctccttcattctgttaatgtggtgtctcacatacaatagctatatgaaaagatgctcagcatccctaatcatcaggtgaatgcaaactaaaaccaaaatgagatatcaccacacatcattttttaggatgtctattatcaaaaaatcaaaagacaacaagtgagaatgtgcagaaattggaaccctgctacactgttggtgggaatgcaaaatggtgcagctactatggaaaaatgcataaaggctcctcaaaaaaactaaaagtaggactatcatatgaaccagcaatctcatttctgggtatttattcaaaagaactgcaattaggaccttgaagagatctcagcactgccatcttcatcgcaacatcgttcacagtagccaagatgtgaaatcaatcttgattgatggatgaatggatttttaaaatgtgatgtaatatatacatataataaaatattattcagccttaaaaaaaaagaaatcttgcaatctatgacaacatggatgacccttgaaagcattatgctaagtgaaaaaggccagtcacagaaggacaaatactacatgatttcatttatatgaggtatcaaaaataggcaaactcattgaagcagagagtagaatggtggttgccagaggcttggggggagggtgaaagggaaactttctaatcaacaggtgtaacattacacttaagcaagatgaataagttctagagatctgctgcctgacattgtgcctatagagagcaatactgtattgcacacgtaaaagtctctacaagggtagatctcatattaaatgttcttaccacaatttaaaaaataagaaattgaaatatggtcccttcaatagaggccttgggatattttctagacacaacccacagtcttcttcaggaattaacttagcacttgtggccatcatatcctcttccccttagttttcctagtaatatgtggtttgtttacatattttacccagatttaataaagatattcaatcataacagtgttttttaaagtcaatctgtgtgcaattttaattaggatttgcatcaggctgggcaaagctttgagagggagaggaaactgagagctgggcattcatagggtgggggtagcagggagggcggggggccagttactgataacttccctgccatacacagactgtggaggacaacagacacgtgtccgcattccgaaaaacagaggagctgggaagttgggagtcccatttggctggttggctcaagtctccattagctggggtttctggaattttccctcactgcagctttgatggtgggggtctgcacaccccaccccattaacaacaagaaagaccccgagtctcaggctcccatccacccctggcctgaggagtcacgccctcggaattttgcttttagacttttactgggcccagggtgggttatgaacagaagcagaatggctactgcccagcaaggcgtgtgctgttccactcagctttgaccacccaggatcaagtgaattagcacagtgcctgacaaatcctgagggtagctattatgaatatgaccatgttgtgtttcctctcctgttttcagtttttgggagatcagaaactcggcttacctttgtattctaagggcctagaaaatttttgtcctataattgtggctcagtaaacatgtttgttgatttcctcatgagtgagatactcaacagagccctctgtaaacaggaaaatatttacatcattgggaatgcacttggctgcagtttcagaacacctgactagctccgtcttgtgctctttttagacagcaccttgtctcatttgaacaagacatctggagcctggagatcccagggctgatatggcaacagtgcgatgccccccatggatatggggtcgttccatgtttcttccctgccttcctcagcatgttaacctttcagcttcacatccgcatcctcatggtcacaagatggctgacaagctccagctctcccatccctagaaaggtaaaagaatcagggttaaaaagctctgtcatgagattttgtcaatttttatttcaaagtgggcaaccgcccaacatacttctctttacacctcattagccagaacagattcacatggcaactcctgcaccagtcactggcaaaaggaaagggtgaaccatggtggttttaagccagattaatcctctgtgactgaagacaggctagcttctctgagattttgagatccccatctcttttcttgacacaaaattggggatctctgtgcagagaagaagcaggaggtgatggctgttttgtagaccaccaagaatgtcaatgactactatgactgctgtaattgtcgctagaagatcttactaaccctatggaaatttcacccccttatgatcagctctactgtaataaagtggatgatggtaggaccaggagcagtagaagacctggggtatagtcctggctctccccaggctgcaacacagacgatggcatttctagaatgtgctcttgatacagaaaggctggattcccagctaaaccttacccttaagcctggaatcatggccctaagtgaaaacagctgacctcctttttccccccaaatgttgccttttttacctgccccgcccctatcctgtgcccattaaagacttcagctggcaaagcaacgcaaatggctgagcgtcgaggatagaagtggctgaacagcgagcagagaagcaactgagcatcggaggttggagatagatgcagctaacttcagatactgtggttttagagaggggcctggccagagacggctgggttccagggacagaccaccttcccatcccctttccagcctccctttccactgagagctgctcgctgctcaataaagtcttctacattcatcacccttcaaacagttcatgtgacctggttcttcctggttcgtcggacaagaacccgggtgccaagagggcaagggctgtcaccctgaccctccactgagtcggttggtacttggccatccctggacagcagagctgaaagagcatgggttgtaacacgcttggactctactgcggggtctgcacagagtctgctcccgccagagaggagcagccggacggttccagcatgaagagtggccagcaataagctgagtaaaacaagctgctccagttcccgcctgcgaagggaagaggtagggactatcccatctcactatcccatcttgctctcacttataaaataggtagatggtgtgtaggccagaagaggcccaccttctcaggggcttgtggaaacataaggtgatgtttttgttgtcacaatagctgaaaggcactgctggcattccaggggacgggatcaaggacattaagtctcttgcaatgctttcaaatgccagtagcacctgctgatgctctctgacatttatttcagctcagaaagcctcccccattcctccttcctccccatccctccttcctctgtggtcccagcttacgccagtcatcgccagccacttgcccagctaggctcctgcggcagtcaaaaccccatcctcatgcctaggaacctgctgagacttaccagaggccaccaggaccgagaggagctgtgggtattctcaggcagatgaaggcaatgtcgcgccatatcccagcctgtgcccaccctctctgctgctggactcagctcctggcgcagcagtcactggggtgttcccagcatctgcctggactgttcaagggctgcagcacccagttccgagctagggctcataattcaggtctacagaggtggaaattcagtcctctgcctctccttgcttctttctgcttccaggacactgggcacattcttacttacgaactttcctccaaggtgtgatcatgtagaagttgatcatttattcatgagagcagatttttagacatgaaatttcaaaatcacatttaagacatattgcagataaggtctgccatttcctagtgtttgcagaggcggcaggatgatcttcaagtacctagctgggtgtggagggagggcgatgccccagtgcagaccagaactaggggattcagcatccaccagcattggagcaccgtgagcctcagttcctgaccagtgttctggctggtcatgactgtgctgtgtggatatttgaacattgtccctgcagacatctccgtgtatttcagggtgtacaggtgaaactgtgtactagtccccacccccagtgctttcacctggcattactcaaccctgcctgagatggtgagtgtgatctgggggagggggttgctgggcattttcaccttgtcccaccaggtccacccacccttcctccctcccgctctctgtcctgggaggctgatacatatgtaccacagcatggcccttgtggcctctggcttctgggtgtggctgctgggggctttgcaggcggctgcgggagggcagggagttgacatcacagactgtgcctgtggggtaaacatggcctggctatgtcccttgactagagaccccagctgcctcccaggccacgttctccacttgactctcctctcccagcctatatcacctaccccttccggggatcctttggacccaagcgagcaacagcccctacctctccaattcctggtcccaggcgcttgcactctccctcctgctgagccccttaccactcgctaagcaatccccatgggcacatgccctccacttccagctggagtcctggcacaaaggggagttcgataccgactgagactgagtgtccaccacagaggcaaatggggacctaaaatgaaaattcagttgagttacagaaaaactgaggagcggtgtttctaaccggcctgggcttttgggttggattcacgcccactgcagcagtgtggacattgtagacgctctgaagaccagcatccattcctttacttggagcacatctagtgggcaacctgacagcgccttgtcatctcctgggaagctttaaaaatgctgatgcctgggccccactgcagagagtgtggggtgcagcctggatgtgggatcaggggcccccaagtggtgctaaggagcatccagggctgagcccaccaagccaaacgctggggctctagaggcaaacacagcctgtcctgtgcttaaggaccccacattctgagaagggaggccaagaagttactcactgaaacataatgttaccagaaaggggtcccaatgccccaggagagggtccgtggacctcatgcaagaaagaatttggggccagtccatagaataaagcaaaagcaagtttattaagaaagtaaagaaataaaagaagggctactccataggcagagctgtgacatgggctgctgggctgagtatactcatagttatttcttgatcatctgttaaacaaggcggtgggttattcatgagttttctgggaaaggggtggagatttcctggaactgagggttcctcccctttttagactatatagggtaacttctggacattgccatggcatttgtaagctgtcatggtgctggtaggagtgtcttttagcatgctaatgcattataattagcgtataatgagcaatgaggacaaccagaggtcacttccatccccatcttggatttggcaggtttgggctggcttctttaccacatcctgttttatcagtgcaatctctgtgacctatgtcttgtgccaaccttctatcttatcctgtaactaagaatgcatacactcctaggaatgcagcccagtaggtctcagccttattttacccagcccctattcaagatggagttgctctggttcaagtgcctctgacaatcatggggcaggtgtccaagtggaagggcgctctgggggctctgagagccctgagaggcgctggccctgtgacatggagaatgggttgggcaacacttcttggaagtaacagcgtcaagccctgtaagccaggtgaaagagggaatggagaaaggcacttcagttaaagggggcaggaaaggcagagttccccaggggtgggtgagaactttctggagtgtccgtagactctgcttaaaatcctgctgggtcttcccagagtacttagaagaaaaaaaaattcccagccacagacagccatggcgtggccattgcccacctccagacctcctccccagccacagagctccaccatgcacagcttgtgtgtgttaaacacatccaagcctcagggcctttgcacctgctattctctctgcctagagtgcagtcccttcctgcacccccaccttactccagttaattttcaacattcagactgatctcggtgtcttccctcactgagggacatcaccccaccacctcaccactaaactcctccccaatctgttttttttaagttttgagacaaaatctcactctgtcacccaggctggagagcagtggtgcaatcttggctcactgtaacctacgcctcccaggtttaagcaattctaatgcctcagcctcctgagtagctgggactacaggtgcaccccatcatggctggctaattttcctccccaatctgaaagtgcctgcccaccacccccaccctgttaccgttggccacatctccttggttatgtccttcagagcatgaatgtctcataatgcaaatttacgcttctcaaaacaaaagagcatccagggagcatctccctaatccaaagggatgctttgtgaaggtgagttttgaactgtgtggccttgtcaggggcattctgagggcctgagaggtcttctgcagcaccccctgagggtctctggtcattgtgaggctgctctttactggacagcagatcgtatgatatgacaaagaggaattttgtttttttaacaatgtgcagtgacaggtttatctagtgagtaaaataaaggccatgttttgcacttgactttgtcattgttccaattcatggttgtttggctgccagtgaaagaaatctaaacaatggctaagacaatgagagtttcacttgtcttacaaaagggaaatctgcagtcagcatccagaggtggtatgtaggctccatgttgccaagaggaagatgggtgcctgctcttgttctactcagcctcgttatgggcatgttcctcatgagcataggtggctgctggtgcacatgcagctgactctggccccttcacttggcaacactcacttacgtctccttggtcacctgctttgacttcaaagatggcaaggctttttacaagcatgctactgaaaccacctttgcaaaaattgagacagtgagaaaattttgacagtgaagagatctgacctaaccaacctcattgtgcctttaacctccaaactgcccttggtcattcctgggtgtgggacgagctaactttgggagaaattcagtttgtagtttaaccttaaaaccaggatgataatagccctttctcaaaactaaatcatcaggttaggattatgagaggggcctgaatctgctgagatgtaagcatagttaaaggatacccacctttgttccagaggtcacaagattcataacttccccaattactcctgcagataacatgactattgtagaatctaagattgaccttttgagacgtcttttcagacttttgcatttctgaagaccggatgactctgcctggacccgagacttgtgacccactgggtcctgtggccccacccacaagcaaactcaacacaccaggaccatttcccacacccctatgattgcatccccaaccaatcagcagcacccattccctaaccctcttcccacaaactatccttgaaaatccctaagccctgaatttgcagggaggctgatgtgggtcataatacaactccagtctcagctggctctgcatgaattaaacattcgctattaccattctcctgtcttgataaatcagctctatctgggcagccagcaagatgagcctgtcgggtggttacactacttagatttaaatatcaacatattcagctaaaagagttgaaagcaattgcccgagtgtggaaaaaagggggggagggcaaagagagtgagaaaatgcttttttagtaagaaaccttatagaagtatttgctaatctgtttgtacatcccttggattaaataaatagaaaaaaaaaaaagattgaagtcatctgtgaagtggctctgcagccagtcttgtcccttcctcctaggggatgggcagcagctcagatccagggccctcttctccatcttcctccccctcctccctcctcatacacagtctgactgcagcttcccagctggagcagaaagcaaaagagaagtgattgtacctaatcacctaggtcattttctcagaaattgctttctttttcaccttttttcatgaggaacaaaaaggaacaggagaggcagcccaattgctgttcctgtgagctccggctctccgcagggggctggcctgaaagggcaaatgcctttggagcaggcttcaatcttctctccctctggagagaagcctgcctcaatgctactctacaaaatgaaatggccacttgtggggaggcaggcaagtccgggcaaaatgcttttcacataagcatgagagagaaagagagagcgagcaagagcgcgcacagctgctaacccgggtgagaagcccagatcaacttccattaactcctgtggctccaagtctttgaaagtgtgtccaagctggactcacatggtgatgccaaaagttgactctgaggactggagtttgagcccagcttgggtctaacttgctgtgcagtcagggaaaagtcatgtaacctctctggacgtcatttctgcatctgtcgaaggaggtggaaggatttctactctgaacgctgaaaggggcaataggaaaagaaaatgaaaccatcgtaatccccccatttgtaaattttgttaggggatatttgcaacattttcttgggctttatgtctcagacaaatgttccttatgttagctcttaaataaggctgatgtgctataatcgtttccttcttgtcagtggtgtacatgggagtgataactgtgtaactgagcatggtggctactgcttggggaaggagggacatgcacttggaggcaggtactccaagggtttggcagcacacacgcagagggcttcaaccctctcctcatgtctggaagctagaaacatggatattcatggtaatatttttcatgccttttgtatgtctacactggagtcatctacactggagtctaccaacctcagcactgttgacattttgggctggttgattctctgtggtggggctgtcctgggcattgtaggatgtttgtcggcatccctggcctctacccactagatgccagtagcaccctccccttctcaattgtgacaagccaaaaagatgtgtccagacattgccaaatgtcctctaagagtaaaattacccccagttgagaaccactagtctagaaaaaagaggacctatggctcggaaatattagatgacttctccaaagtcacagagtcagtaaatgaaagagatggctccagcaggcaggcttttcattgtcagctagtgctctttcaaacctctcagagtgccctcaagagcagatagctttattgttaggattacagtggagttgcatcagacgtaaatacaacggaatacacttgacagaaaataaaacgtgggaagattatctttagttttataacaaaaaggatagtaaatgtatgctaataatgaaacatagaatatgtaaatgtatgtaaataatccagccagggcatgcccctctttgggcacctgccggtgggagggggtggtggcagatggagctgcgattctgtcattgtgtctccgttgccaagggccactcaaatatgttcatttagccatattgaggatgatcctggggtatgaacatcttcagctgtttctacatctgatgttggccttgattagtaattttagatcccgagccaacatcaggtgctaccctaccgtttttcaaagagatggaggctgctgatgccatgtctccagagcagagcagggtggcaactggttggctggaacctgcgggcccatcatgggtaagaggaaatgaaaattctggaaaggtgaataaattgtaagcaagcacctcacggcttacataacgtaattgaaatttccagaagcagatggatgatgccctagatccaaaggcacagtaactagatggttttatgacaagggcagctcatcaaatgtcagggacgttctgatgcagaattgcagatgtcagggctagcggggcagttggacgatggggactctaacacctcttccaactcattgcttttcattaagttattagatatgaaaaaaaatacttctagtccagactgtcatttgacctttcagtgggcccctgactacgtctctgactacgtttttaaactgatggtcagcaaatgcatcccaggtatgcgtcctgggaggaaacagtgggtaatctgtgccacactgcatttaactcaccaacaaattccacctcacattgagggggatgatgagatgcagagatgggcttgacacagggcaggaattcagctagtctttgggctccttagagggaggccttgggcactgaatgccatgatgtctaaaagcccagaaagcttggaaaacctatagaaagaatgtgagaatgattcgaacggccttcccaggcataaaacaggggggagatactgctcattcaagtggcccctgcaagcttcctcagtgtccttgaggaatcattggctaaagagccttggctacccagtggttaggaggatctatggttatgggctggagccaggctgcctgggagttagatgcagcaacctcacatggtgctgtgcaacactgagcaggttaattaatctctctggttttgtttgtttgttttgtttgtgtgtgtgtgtgtgtgtgtgtgtatacaaaatggaattatcatgaagataaatattaagttcagctatatgaaattgctattccccacaggaaattgtcaaccataggcaatttcatatgattcaacctaatattccatagggaatgaagttaacagttgaaaagttctgaccaaagtgcctagcactgaataagccccaggtaaatgttagtatcttacttacaaaagtttagggaaatgtacagcatcttctctatgtgtttgtgtggtgtgcttcacactagtgatcttcaaactctatcacaacctatctctattagtcagggttccctaaagggacagaactattaggatatatgtatgtatgaaggggagtttatcgggagaattgattcacaagagcgcaaggtgaagtcccacaataggccatctgcaagctgagggacaaggaagccagtctgagtcccaaaagctcaaaagtaggggagccaacagtgcagccttcagtctgtggcccgagagtccctggcaaaccactggtataagttcaagagtccaaaagctgaagaacttggagtctgatgttcgagggcaggaagcatctagcacagcagaaaggtggaggccagaacactctgccagtctactccttccatgctcctctgcctgcttttattctagccgtgctggcagctgattagatggtgcccacccagattgagggtgggtctgcctctcccagtccactgcctcaaatgttaatctcctttggcaacatcctcacagacacacccaggaacaatattttgcatccttcaatccaatcgagttaacacttattaaccatcacaccatcagagggttgtgagctgttaataggttaagaaacaaaatcagtgggtcagaatttttcccaacaggacggaataggggagaagacaataggatattttacacatcataaaataaatattgctttaagaggcttgtcaattccatcacgtgtgtgtgtctgtccacatgtgcgtgtgtctatgcacgagtgtgtaccggatcacagtgaaagatacatttcatgctacgcattagagttgaataaagttttaaagtcagctcactcgaccatatatactggaccttatgagtacttaagggaatttttaagagtaattttgactgtgccactcactaatctgtggtcttgagcaagttactgggcctctctgtgtctcagtttcttcatctagaaagcagtgaagacccttgcacctgcctcccaggactgaggtgagaaaagcaggtaagaggcttggcgtatttcctggcatgtaatgaagagcccagaaggtgctagctgctgctgttttgcttgttctttaatttccatggcacgaatgacattgcagaaggtgaggctctactgctaaaggaagaaattgatttatccctgatttgggggaaagctcacaaggcagaacattcttcgataaaataacctaagaatatcaaacagcaaacaattacccacatgtaaacaattacactgcactaagtaactctgttatagaaagatggcatcactgtagggagagatcaatccaagaggacttcctggaggaggaagttctcagctgatctcaaaaaagattcaggggtgggattggaggaaggctgggtcaaggacatctggggagaaaaaaggattgtggaaagttcaagatgtgatcggtaaatcatgcacaaatgccaggatcaagagctggacccacctcctggagagggaccacggtcagacaatgctctctggggttcacaggcaagggacaaatcagacatcacgagagctcactgttgatggcatattatgatcatgtcagggccgggcatctgcctaagtactacaaatgtttatgaatattaataagcattttgttcccaaaggaccacaaatcagttaattagggccctgtcaacctgtttatattatctataaatgaaaacccgtcagcaaccaaacatgaaattaagtgagccgtgtgtgggctgccaccatctctggataaacaacactgccagttcccgtgtgagccccaccctcggtacaaaggaggatattctcctcaccactctcattttaatcaaggcagtggttacaggaggcccatgatagagggtgcctcaggtttcaccactgcatgtggggggatgatttaagactgtcggtaaattagctgcaatccagagtcttggaggagaagaagaattacctataaatcaatgttccatggacaggtaatcaggcccccattccaagccctgattacgctggacccagcagtccatctgtctcgtcttcctggggtgatggggctgggatgggggcactgagtcattggccccacctggatcatgtttgcgtctggacaggtcagtgtccctgagcccaggtgtcttaagtgtgtttcctggaacaatcctcaagaaatcacagggccctagaggcagaagcagagagagagagagagatggagagagcggcagggactgagaaagagatagattcattcaaaaacagtgtgtgctgagcactgggctcgcagcccaagatagacacgtcagtgagcaacggaacagacaagagaggtggcaggcgacagaggagccaaggaccccgcagaccagagcatgccctgaactgatcaaggcgagatgccctgtcctccacctcatgacacgggtgactccttccgaaaaatttccttcccaaaaactccttctggggcaaatccttgttaatattttttcctctatgcaaaaaactatggtttattgaccatttttatgctaaaacaacactaaattccaacaagttgcattaaaatgggcacaatggcttgaagaattagaattaatgatcaaaattcaacctaacaagagccatccctgcggtagagaactggggtagaaaacacagatcctggagccatctccctggtttgaatccaggctctgccatttgctggctgtgtgaccttgggtaagctacttacacggtttgtgcctcagtttcctcatctgtaatatgaggataataacaggattgaccatgtggcaggattgaaggagttaatatatgtgaagtgaacatatcagctgtctaataattgcctgcttgaggggaagtaagtaaagatgtttagggcctgcagcctagttgtagcacaaaccagctgtgcaaccttgagatattacttaacctctctgttgtctcatactctctatttccccttcctgtgggagtaaagtggatctacttagccaggtttgctcatgaggatgggaaccatgcatctatgttgtaggtttgcttacttggttcttgtcgccgtcccaccaaaaggtaagctctggggtagggacgtggtgtgaccaactgttccctgctgcctgcagggtccccaggcccagcttcacaggcttgtgacctgtgcagcctcccatgctcagaagagcccccgacttggcttagtgctctattgtcaccatcttaaaattcttaaatgtctttgaacatgaaaccctgtatttccattttgcactgggcctgcatagcagggatctgatccaacccacacacatgtactaggtgtgattctggtggcaggaagcctctttcatctcttcctaaacatgtgagcatcattttctcccttgagctcgctgctgctctgtgcctttctgtggggaaaggggaacacccccccaaccctggaactccaggtccctgccctgctttccctaaaaagggtccctctgtccctcacagatgtgctgggaggtgtaagcacattttcccagttgagaagtgatccagagtcaccccgacatcgtgcccagcactgagctgggtcaggctggagagaaatggtgttggccacagaatctgccatcccattgctattagtgtcctgtggctgctgtgacaaatcactgcaaacttcggggcttacaacaataggaatttattctctcacagttctgaagacaggagtctgaaatcgcggagtctgcagggcctcgcttcatccagtgtctctcagggagatgccttcacagcctctctcagctttgggcagccccaggtgttctcggcttgtggtggcctcagttgagtcccatccttcattttcacaggtcttcccctctgtgtctgtgtctccctcttctgtctcataaaagcacttgtcatggttgtaggacctacccgattaatccaggatagtctccctcaagagtcttcacttcattatgtctgcaaagactcattttctaaataaggtcccattcacaggcaccagaggtggaggccttggtcatatcttcttgggggccacagttccatgcactccatatccaagatggggcagagaatgccatgagggcaaaggaaggcaggagcatgacagtagcagcttatccgagcacagctcttctgcgtgccgggagaggttcccgttgccttgcatgttcgttaactcatttgctttgcatatcaaccgatgctatgactgtacccattttacagataaggaaactgatgcacatgcaaaaccaagtcattgcttcaagacatccagcgaggacaggtcagagctggcagtggaagccagtaagtcttccgtctatagagtctgagctccaacccacctgcaccactgtgggctagggtctcagatgtaggtggcctggggccaggcaggtgacataaagagtgaaggggcctccagaaagtggccagggctcgggtgaactggagagggaggtgggatgtcgttcctcagcaccacccaaatgcagcggtttcaactctccctattttccaaaaagggagtaaaatccaggcttttatgtggaaattcccaacgatcagatttggtgattgatatattttttaaaagcaaaatgaaactcatcagtagtctgtaaatcagcagtcagctaccacctccacggtaaaggagagggtcattaattctgactttgggagtcaagaacacaagaatggccagcgctgatttaggggacgcaaggcccttccgtgggcacagccgtgcttggcagagccgcgggcgcttgtggctccctgcgatcgctgactcttaagtcctgctctcatctggccctaaagaagccatcagcaggaggtgacagcgaccgtaattctgtttttatgattactgagcaacggtcatttcaggctgagtggtgctgagtgatgggtggtgatttaggcgccttacagagggattagggaggtaaagctaaatgcattttcctccgaggcccagactggctgcaaacaagtttccatggaggatgctgataaaaagcaaattattttattctgttcacaatcaattccaactccagactgcagacttccccaagaaataaagcattaacacttatcgtatggagctgaattctttgaggaatagtaattcttaaacagacagaggcaacatagttttaaaccattaaaatccagcgtgtgcacttgctcatccttcttcttaatgagccttgcgccgtctccatgtatttggtgtaagaaatgaattcaaatcacatttcattgacagggaaaggggtgcccttgggggcatttgtactagaaatagacatttttgcaatggggttgtcggcttgtgtggtggacgctgggtctttctgattgttcagcagccattcccccattctctggccccaggtgttcttggctcacaaactcaatccctgtgctttgggtggatccagggttggccacgtgacccagacctggcccttccattgtccagcctcagtcactggtaggggtggggatggggctgaagatgcaaccctggttggtctagtcagagccgatcccggatcgctgctggcacaacagggactgaggcctctcctgatctcacagtcactgtgagggcaggatagcggcctgaggttgctgctcatcatgtctttcattcctgccagctgagaatggggccaacctagagaacagaggaactgagagacagagagaaatggatcagtgtttccagagtccagaatccaagtcacttaaaccctggatccagctgcatctgaggccataaacccttcgagctttcatttacagaagtgatcatactcctttttactttagtccatctgatttgggtttctgtcactcacttgcaaccaaaaaagtcctggcacacacctccttgtaagacaccatcttttccagagcactggtctagcccatgattttccccaaaggtgacagcacagagacaattcttctctctctgctcagtcagacatacactggcctggggtcctctggtcattttccttgcttctcttaaggccctgttccaaacatgcaaatcacggatccttccatggttaatctctcctgggcagaggttgagggaaggtagaggtcaccggcacatagttcatttgcaaatatatgctgatgacatctatcttccctcaaccaatgcaccctcaggttgggccctggctatctaacactgcaaaaagccttcacctgcctagagtgattccggaaacaccaagaagcatgccctccctgtttccccaaatccttcccacaccatcgctgctgcctggaatgccagcattagggagtctcgttttgaatttccagatgaagaaaatcatcctggagaaaagcaacactttaaacctcacattaaagcttcttcaatgagaatatgagaatccgttttccacgagcaattgttgataagagaaaggtagaatttgtggcacggtccaatcttagtctcagcatttacgatattttgggagcatgaaaatctctggagatgtgacctagtggagtagaaagataacgggaggcctggtttctaatcctgctggagattcatttacccagcaaatacttactgaacattattacgtgacaaactctgtgcaaagcaccagaacgttgtgagttgtatgactttgggcgttttctgagttgcaggggtgaggccagaaacagtgaagatgaggacatttggacactttcccttcctgcaccatggcatgcattactaaatgatcaggacactccatcctgctgggggcttgagcatgttcttagcgggtaccaggtggctgcatcagtcagaatgggctagattatgctgtgtaagaaacacataagctgtttcatggctcacaagagcaaaggtgactttttcacggggctgcaggtcctccacagccggactgccactcagctccaagccacctgccatccagaactccaagctctatcacagggtttcccaacctcagcactactggcattctctatcgtgggggctgttctgtgcagagaaggatgtttagcagcatctgtggcctccaccgatgtcatgggttgaattgtgccccccaacccttttcatatgttaaagtcctaagcccagatacttcagaatgtggccttatttggaaatggggttgctgcagatgtaattagctaagatgaagtcacactggagtagggtggggctgtaatccaaagtgactagcgtccctagaaaagggggaaaattggatgcagacatgcgcacagagagaacgccatgtgaagacgaaggcagagatgagggtgatgcttctatgagctaagaaacaccaaaggtggccagtgacacaccagaaactagaggagaggcacagaacagattctcctcacagtcctcagaagaaccgaccccaccgacaccttgatctgggactccagaactgtgagcctgttgtttctgttgttgaagctgcccagtctgtggtaccatgttactgcagccctagcaaacaaattcaactgcagggtgcccgtagcacccttcctccaagtcatggcacccaaaaatgtctccagacattgtgaacggtcccttgggtgtcagaatcctcctgggctgaggagcacgctctaccaggagcatttccagggactggtggagcaggcacaggtggagcttcagctcagaagtagctcatgtcacttccactcattccattggctgaagcaagtcacgaaggcatgcctgagtccacagggtggggtttacggccttcccatggagcggggcattgtacggtgaacagtcacccattttccccaaaatcaccacctaaggggaagaagtggcaggtgagcccgtggtctcaacctcccctccactgggcctttgctcacttgcctccttctcaagggggcttgctggggctgcgccctctcccaccctcttgtctcccttccctgctgtacattcccctggttcttgcctctgtccagcacatggattcccttcggatgcattctgagtgtcctctggctcccctcccacgtgccagccccacgaggacaggccctcggtgttacagctcagcccctagcacgtctcctgcccggcgcagatgctccatggatgttggttgagagagtgagtgaatccatgagcgaataaaactttcaggactaggtgatctccaagaacacgctggaattctcccattccagcaggaattggaggctgttctttcctgtccctaagcctacccatcccatggtctcacttcctgccagaataacagatcctgtccttatgccaagggagtaaacctccgtcccttcctcgtagttggccagtttagctcctagtcagtaacccgcaggagcagggtgtttggtaaccaggagctaccaactgtaatgaggacacctgcagaagccagggcctctgctggttgctatggaaaccctgcaaagggaaagtcagcctttcctcatcagagctatgtggaggcagatgcatgttggtgatctcattagcccttccaaccagtggcccctggaagtttcctgcttgcaccctctcttgcccatccactctctccctgagctctggagatgagagcaagtgttgtcctggggtccttggccttgtggggttttacagtctatgcaatataatctacaagcatttattgagcatcttttatgtgcttgggcccaagtgcagcctttttcccccaaagagaagacattgaaaaacccacagcagtgtggccaagcacacgttctggagcccgaccgtctggttcaagtctcagccctgccattctcttgctatgtgtggtgcctttaaaatacttctacaagttctttgacagtccttccgctagaaatatttttgtttctctgctgttgactaggaatgagtcgtcctcacggacagcatgtaggggaagtggaaactgcaaattcccaaggtttggtcacaaaaggcagttcagatctcgcccctttctctccctctctctctctcgacttgtttcttaggagctctggcccaaggtgtcagaactttgatgaccctgaagctaggctggagatgtcatgacaacagattgcgcggagacagacagagatggtgggggagccctagctcctggcctcagcatcgctgtgggtatgaggctcagaggggtagacacgctccaagaccaccaggcaatgccttatctgcaggcatcccagaatgtgaacttgagcctcctccagctaacacagactccctgctcccatggtgtgggagggaggaggcagagcccagaggggagacaatctggttgtgcagagaggaacactgagggctgtgttctgagtggcaaggagcaagggactcgcaggggcaaggctgggggcaaggccagccacaggcagaagtcggggctgagcacaatttgcacagctctagcaagttctaacttctcctcctatagtttcttctatagctcccgagacactgctccttgtgagtggtggtaccaagaaagggacagaagcaagacacaggcagagaaagatagagacacagagagacagggaagtgcccaaaggaagacagactgaagcagaaagaaaaagaaagagcaagagaaagtgagagagagatcaaggggaagacagagagagaaacggaggctggatggattccaagagctacagaaagtcggggtcgggtggcgggggcattaggctccaggtattgagaaccccaagtctgatcccatggaagtcactgcttctgcctcctgggaaaaggctggcagctgttcttgctggtcacctacccctgcattcctggtcccaccacccccagacacataggagctccgtgtgctacaacaggcctttgtttccctgagggtccattctgcgcccagccccatctctgccctgactcccaagctgcccacctcctggcgtgaacagatgcccccctcttcttgttttccctgtggacagaggggacccagcctgggcttctccaggcccgggcattgtggattcagggcagacgccctccctgggaagtcagagggaacagatgtgcttctgtggtctccatggagacctgccagccgggcaacctcaatgggcagccgggcctcgaagcttttgtctttgcaaagcctttcgctgaatgcaaacactaaaagcaaatctgccaggcatccagagagactggggcttccctcctggcctcttggggcctggccaactaggacaccccaaagcaggaacagatgcatggcggcccttggtgaactctcagaggaccccaggcacaggctctggttaaataatgctcggctccacctgctgttgttaaaacatgccaatgcccactccagttatagtacgatggccccacaagtctgccctggaagaaagaaaagaacaaccctggcctgtcttgaatggatatcaaaaagcatgttcaacaggtggaggcagatgactagaatatttcacggccaattgtttattcattcggcaatggactagggtataggcagtgagcaccccagacacagactgtcctctcatggagctgatatgaagtagaggagatggacactcaacacggtgacaactaaataagaagtttccagccaaggaaacaagagcagatcgagggctagagagtaatgagagtgggtggggcctatgtcatggggcacacagggaaagtggttccaagcaggtgacatgacagcagagacctgaatgtgatgaggaagagtggcctaggaggagggctcagagtccagtgtaaaggctcagagtccaccttattcagaagctaaggcactcactaatcagaattattcccacccactcaggatgcttcctggcttcatgaagatggaggcacagcctctgccccaggaagaccttgtaagatcttcttcctcttccagagggcagggtcaggtagggggtgcagagagctccagggggctcccctttcaggttaacctgcatgtgaggctgatgttcaggtgctgtgggaccttaaaaccacagagctggaaggttcctctggggtcacataactgcccagtgggttctccttgcgtgctgcccagacagagccaatttatcaagagaggagaattacaacagagaaagagtttaattcacacagtgctggctgaaggggagagcagagttttattactcaaatcagtctctctgaaaattcagaggccagggtttttcaagcacagtttgttaagcaggaggctagggaatgggtgctgctgattggttggggatgcaatcatcggggtgtggaaaacagtccttgtactctgaattcacctctgggtggggccacaaggaccgagttaaaagtcacaggtccaggtagagtcatccaggtggttttcaggaatgcagaagtctgagaagacacctcaaaaggccactcctaggttctacaatcatcctgttatctgcaggagtcactggggaagttgcaaatcttgtggcctccagaataatgattggtaaaatcctttttgcctggtagaatttgggctcctctcatccttctaacccagtggtctttcattaggaggtttagtttgtgggaagggatattaccatttaaactatacactaaatttctcccaaggttagcttgccaagcacaagaatgaccaagggcagttggaggctgaaggcaagataggggttggttaggtcagatgtctttcacggccataattttctgttataatttttgcaaaggaggaattgtcagaggtgaaccaggagattccatcttgaataggggctggaaaaaatgaggctgagacctgctgggctgcattcccaggaggttaggcattcttagtcacaggatgaggtaggaggtcagcacaagatacaggtcacaaagaccccgctgataaaacaggatgtggtaaagaagcccaccaaaacccaccaaaaccaagacagtgaccaaagtgatctctggtcatcctcaatgctcattatacaccaattataatgcatcagcatgctaaaagacacttccactagtgccaggacagtttacaaatgccatgacaacatcaagaagttaccctctatggtctacaatggggaggtaccctcagttccaggaattgcctgcccctttcctggaaaactcatgaataatccaccccatgtttagcatatggtcaagaaataactataagtatactcggtcaagcagcccatgctgctgctctgcctatggagtagccattcttttattcctttactttcttaatagacttgctttcactttactctatggacttgccccaaattctttcttgcatgaggtccaagaaccttctcttggggtctggatcaggacccctttctggtaatgtttccagtcactcaggccagcatttcccaaacaccagcattcatgtccaccagcaccgtcttgtacctgcatctcacctgggcaaaattacctatgtcctttcaaacctgctttccatcaactctcttgtaagaatcaacctcatacttgggaatagcaattatcacattatttcttgttctttctatttcttgataaatagttattaaaatagaaacatgcatgtccaggtaccacctgaaatctgcccactgatgccactttggcagcactgttcttgtccagcctctgagtttatgcacagctgaggcccagagacatgagaggatttgtacaaaaccgcaggattagcaaactctcttcatttccaactccctgtctgtcctctgggctggctcattcccagccgacattcagaaaacaggcccagtgacccaggtcacccagttctcagaggatgccaggtctcagtgctctttgatttctttctgaataagctgtctctttcctcctcaatctctcccttccatctctccttccctccctcctttcctccttccttctccctccctctccactctccatagttctgaagtcaccaagaagattgtggaaacttaactcttcctaactcactgattccaagccactctttccagagaaaacaccatttatttcaccctcttctccataaaggggcaaaaagatccttattcctcatgaacattttgaaacaacctatcacatcaaatatgggtcaaatcacccccaacagaatccttcagggaggattaatggatacatttattgactcaacaatttttattgttatttattttgctacttttaaaatatgacatttattggttaggtggtttgatacagaagagctttcttttcattctgcttttgaaagttctatacaactgaatacaaagaggaacaagaagtaccaaaatcaaacttattattccctgtccatgtggcattgaccagttttgtatataacagatagcgacagtttttaagtttcctttagaaaaatacgaattctacacatttgctattgtttcctgtctaatgcatgggctgacatcactgggatcagcttccttcttgaagaaaaaaaggagatgaaagagaccaacatagggtcagaacgcatggcgaatctttctgaagctggcatctgactgtcacgtagcttccccagagctgctggaaaacagccctctgggtttttgtttttgtggggttttttttttcacagccaggtatttcatgtagtgattgaatctcagcatttcaacaaatatttattaagaactcaaatgtgagtcagaccctgttcaaatcactggaagcaaagcaacgagcaaaagaaaaatcctgccctggtggagcttatattctgcttggggaaaacaggtaatgaaccaacaaacaaaggtaccattgaaacaaaaatgaatgaatgaatcattagtcttcatgcaaattcctttccatccgtcaaaacctggcttaactctgctttctcctggcagccctcccagctccagaacatctggacgctctgtcctctgcctcccatggcacatgacacacgacatgtggccctgcagagagccactagcagctcaggggatgttcaatgaatgaaaacagatgaatgagcatgtgcttatgtgcagaaaacaactgcggatgtgcttgtgtttacgtgcattggatgacaggtgtgtgtgtgtttgtgcacacgtgctaatggaggaggctaggtatgtgggtgtgtgcttgggtgcagtgaattgtgttttgtgggttggaatgaggttgtattcagcacgagcaaagatatacagtacctgagcaggaggttttgtggttcacaagagtgtgtgcatttaacatatatgtacaagtaggtgtgagtgtgtgctttataagtgcatgtgtatgtgtgtaacagagggtgtgggagtgtgtgtgtgtttgcaagtgcatgtatatgagtgtgggtaagagagtaagtatatttgtgtgtgtgtttgctagcgtgtgtatgtgtctaagactgagtgtatttgtagtgtgtgtttgcaagttcgtgtgtgtgagtgtgtgtgtttgcatgtgtgtggtaggcacagacacacgcctaacagttcctgcctgactggcaggtgtggattacagaccacactgactttgtggcgatccagaaatgcagagcagggatggatttctgcccaggattcaggaagagggaagaggagaatggtagcggggccaggcgcggtggctcacgcctgtaatcccagcactttgggaggctgaggggggtggatcacctgagatcaggagttcaagaccagcctggccagtgtggtgaaaccccgtctctactaaaaatacaaaaattagctgggcatggtggcgcgcctgtaatcccagctactcgggatgctgaggccagagaattgcttgaactttggaggcggaggttccagtgagccgagattgcaccattgcactccagcctgggcaacaaaagtgaaactccatctcaaaaaacaaacaaacaaacaaacaaacaaacaaacaaacaaaacaaaaaacaaaaacggaagcagatagagatgcccaggagcttgcattccgtcttctgggtcccctgtaccatcaagaaaggaagccaagggtcaggcctacatgtgatcacctgtctatgccaagggtgcacccaaggctgccaggcttggttgcttccatgttccctctaaacccccttctctgtgaagacagagactgtgaagcaactgcctttgaagaggccatgcctgtctgagctgagctcctccataagaggtggtctcagtgtaggaagaaccatcagaccactgggcccaccctgactccactgctatgagctccatggtgctggataaatggctccgctcctctgctgcctcatccacatcacagacataaaaaacccatctggctcagggggcggaggaataaagaaagattggttcccacacagcacataaccaatgccctgaacaaacgccattctcggtgtcattgcctgttcctatcatggggcaaagcttccacacaggacccaggccagcagacaccagaactgctccccctcggtcacccatcctcatggctcctgcctgcctgcttaggggctgtccctggggttccccagggctgtcccatgctcctcccaggcctcctgaccatgtccttggtcaggtctctattcccctacccctgcccccactgagggctgactttggcctcttcttggagatcccagaggactacccagggaccacctatttcccccacccaacctggacagcctgcctggctgtgctcctgtgcctttctcctctccctttaccctcctgctcatccagcaggagcaaagctccacatgctgtcttctgactcctcttcccctatcactgcacgcaggagacctggccacactgaagtggccccactttcctgccccctcactcactcccaaacaaacccccactccctccagagagaaggcaggtggaggaagcaagagtcgagagctgggtctgcacagctgagttcccctcgggaccctcccaagtgccccagagggtcctggcttgctcagctccacatgccacccactagccacgctgggcagcttacctttccagctacccggaacccagggctccaaatctccgagatggcttctcagccagaaaagtcctcctgttgacttcttcgttcccctcgctgttccagggaaggtcaggctatgtggatttattctccattaaatgatacatgctgatctatgcaccctcactatagccagagccgctcccacagtgcagagctgtcagcgtggctgggtggtcagggccacagccccaggctgggaagactcagcccatctcttgaggtccacctgggtcccagccacagctgaatggagcttctgactcctgtgcccttggaggtgtggaatgggacttaaccagagaggcctgatgccgccgactccccacagcaaggacaccagatgccttccaggaagccacaggccctgccacctccaactccatcctcaggtcctctgcagatatctgccacagaattcagcccacggagaccaggaactccaagggcagtcgatcaggcctgactgtgccagggagcccaaccccatccaccccctgatgacaaaatcttcaactgctcaagatgcctgcaccgaggagcaacatggggtcagcatccactgggaaaccatcactcatgctgggggcggcctgagagcagagcccggcccatagtaaattctcagcaaatactgcttatttttaatatcctcccaaaaatgcaaccaccaactgatggtttgccaaacttcagtcatttacaccttagcttcctgtttttttgttttttgtttgtttgtttgtttgtttttgagacagggtctctctgtcacctaggctggagtacagtgactcgatcgtggctcaccgcagcctcaatctccccaggctcagactcctgagtagctgggactacaggcgtgagccaccatggctggctaatttttgtgttttttttgtagagacagggtatcatcatgttgcccaggctggtctcaaactcttgggctcaagcgatccgcctgcctcggcctcccaaagtcctgggattacagacatgagccactgcacccggccagcttcctggttgtcatgatagcaacacctgtctctagtttttcctagatttttcaaaatggatacatattctacttaagcacagctatttattacagaaatcacacgctctctctctctcttcgtattttgacgtttaaaaccagtgccataaatagaagataataataaaaggaaatacagtgtgagtagtatcacagtggcttccaggctctgagcctgaggcctgctccatccgcagaaggatgagcaagcgatagcgaagcattcaaggcaggctttcgatgggcggagactctggccaggggaaaacagagggatcaaaagagatttgcacctgcgagtccatgtcattgcgtgtgacacgtcagcctgctaccaaaacaccttgcgtttgtctgaaagcccccccacctttctgtgtggctcacacgtcctgcactgtgggaaatacggagtccaccaagcagccaggcaccatggctggaagatcagatctgtgccaggtcagcccatgcgctcccatctggctcaagtcagtttctttacctgtgaaatgggaggagatattagactgatttccctaaggtccctgcagctctgatctgctgagaagtctaacacaacacatccctgtgattttccaggatgtttaagaacatcaggagaccatcagttaagacaatctggggtcatcacccagtcagccctggttgctttattgagcaccacctgtgtccggagcacggcatagcataaatgaggtaggttagatgatgtggtcacagtctcccttaaaggagacttaaaggagaccttaaagtctccctcgaaggagagcgaacttgctaaatatatggagagaacgcactgcccaattgtgcacaaactacatcctgggcttgtggttagaatatcctgcagccaggaggtagaggagcagaaaggaaaatccccaaattcatgcaagtgcagaaacttgtgattaatgtccttgggttgacctgtgcttattataacagtaaaaaacacctcagtggagatttacaatgctaatgagacatgtatgtacaaccatgcacagccgcagcctatgcactgccagaaaaccacccagaacatgctcagcagcagagccccttcctggcccttcatgaattctcatggaagacccccaaatctgcagcgtccgtcggtgcagcctcacccttgctcagcctgctctgatcagctggcagagcacacttccgttttgcaatccactcccttgcttgcttttactttggacttgctctcaaattcttttgtgtggcggagtcaagaacctgaacctgcccacaggcaacataaagagacaaaaggcaggtcctccctcccgtgaaggaggcagctggcaacaggaggcactttctgggatatcaacaaggcctctgtgtcacagggatgcccactcctgcccacccatgccgggaggaccctatgatggctgaactctcactgaaggcgggggcttgatggccaacaccccagcaaacaagcttcatttgtttaacacgttcagtatctgtctttccacttgctgccaccccagctcccctacacaagcacacacacgtgcacacacacacgcacactcacacactcacacccacccactctctcacgcacacacacgcactcacacccattcactcactcacaggcacacaccctcacacaccctcacacgcacactcacactctcacacccacctgcccactctttcacacacactatcatacacactcacactcacacccactcatacactcacagacacacacactctcacacacacatgctctcacacacacacacacaagctccacgagggcagggctttgctcattgtagtaattatggcatccccattgcttgaccaataaccactggactcattcatcccacaaatagttattgcacacctgccgtgtgccaggggccaggcgtatagagttgaaagaggcaagtacagcccttcttcacgtgaagtctgcattgtggttatggggtcagttaagccaagaagccaataaacacataattccaggcaattatagatgctgtggaaaaaagaatgcagggcaggagatggagcgagagagtggggctgctgttgacagtggtcagggatggtttctcggaggaggtgcctgtgagtagagccctgcgtgtgatgacagccagctcggaagggcaaatcattccagcccggcccggcattccacagcctcctcccagccctcatgtgtctccccggtcctcatcaccacctggtattccctgtacatttctttcttgtcagtctccctgagtgtaatttaaattccataagggaagggataatgctcaccgtgcatacttggagcctagaacagtgcctgacacgtagtagggtctccacgcatgtttgttgaatgaaagactatcacattgccttgtgattgtttacattacaatacgattaaaacattagtttgtgactcatctctttttcttctttctgatagcccctgtggacttctcagccgaaaaagaatggcaaggtgaccttctgtcctttgggaagcaaaccaggcctgggggctctgagttctgagcccctttctgtccaggtttcaaggctgacacctcgtgaccatcaagtaatgatggtagccgggtgccatgggagggaatgaaggctggctgggggttacagagaggaaggagttacagagaggaaggagtgggtcctgcaggttggttcctgaagatgggcaggaagggtggggtttggggactcgaggcgcatgggaggaagggcctttggggggatggctctgggtgggtttgcgggaagccagactgagtacacagagggaggaatgtttctgccgcccagcgccgcagcagaacttggccttgacagttgcctggagggtgggaggaagagttggaagggttctgatagcagcaactgttatcgttcccaccgttattaggctggctggtgcgtatcgagggcttactatgccagcagtgttctcagcggttcccacatattgagagattcaatcatcacaacagttctatgaacagggactattattccccttttacagatgaagaaacggaggcaaagaatgaggcagtaactttcccaaagccacacagctgctaagtgacagagccagggttcagctcaggtggtctggctccagggacacagctcagccagcctcacctgaggacgaggggccctttttctcgggctgggtgagccccctccccatccacccgaaatcatgaaatccccaaaataatgaagattcaattttaaaatgaggagttgacacatctcaggggaacaagtccccatttgagcatttctacctcccttcccacaaaggtgtagagattgtacctgctcctaccatgacgatgacaatatgtaagcaaacctctaaccgtgaaacacaagtcctgggcatcccgctgggcagggtctttggtcctccacggggacaggtcctgtgagagggtggcattctcctgggtgggaacatcctctgtaaatgcaactcccagagtatccccccggccactgactgtgccttgactctgggatgggaagatcatctttccagagacagggaaagaagcagtggttcggaggcagtcagggttccagtcccagctctgccagtaagtagctgtgtgaccttgggcaagttgcttggcctctctgtgcctcggtgtcttcctctgtaaaatgggcatgaaggtaatggcccctcccacagagagggcttggggatgagcttggtcagcacgcataatggagcagtactgggcacagggtaggcgccctgcaaagtcagatgttctatttgtttgtttcaggcttctaatcctatcccagccagagcctgggaagaaggagatgaaaccaaaccaaaaagaatgttttggttgccaaccataaacagaaatgctcctctaaagcagcactgaccacccgtggttctctctgcagggtcagggagctgagttcttttccacaggacaaccacccaggtcataaacaagccacaaagaccaaaacctggtcttaacctcagaccgggaagaagaagagcaaatcactaagcaaacgaaattaaacgcccaaacactgcaagtacaaacaaaccgcacttccctctgtggagtgagatcagggctcatcactggacattgaaaataaaacaattctgttttctcattttaagggtggatggagagaggctgggggcttgagggacgtctttgggagcagatttcagtgggcagctgcaggaacatagctttccctgggaaaactttccagagtaagttttccttgctttgaactttcatttacaaagtgaacaaaaaaatcacgttcaagaactgaggctagacagctggctctggagcacagaacccttggaaaacgggagaaccaacctcccttccttcgccttccctcagcagccgctctgctggggttgcttggcacaggccagggacaagcttgccgttatggagaaagttttagtctcaagcgtgagcgtgtggtcacacggataagtcattagagggaaatcagggatgaaggttgaagaggaaggccaccactctctgttggtggaacggttattttgtgaaatggaacccgtgttcagaaaagtgcataatacgtatttgttattattagcagattattgtaaattgaacattcaggtaccccttccactacatcatgatacagatagatactctggaagccttctatgtctccctgtccaatcacagtctcctttgctgcttaaaagtcatcattcttctgacttgaggcactagcctccttgttctcctctgtttttacactgcctaagcctgatcccctgaacacacagaagcttagttctgcctgattttggacttttgtgtctggtttcttttgctcagtggcatgttggatgcagcctcattcttccttgcactgctgatgttttgctttggggtgagtccaccatgaggtgcttatccattctgctgctgatggctgccggagtcatcagcagggcacagggactgttccccatgccgcttcggtggacgacttggacatgtgtcccaccgcacatgtaaaatgcatttctgctggggatataccaagtgtgcaattgctagggccagagggtcttcacatcttcatctccagtagacaatgccaaactttccaaagggttggcgtcagtgtctatggcccccagcatcatgcgtggtagctccgtgttcttgctggcacttggtactgtgggaacgtcacactcctgcttggttgcctgcccctggccagaggctggccctttatcggaggaggccagtgcacagcaagagcctccaaagcagagtggggaccattcacacctggacatgactcctatctgtcctgcaggcaatgactccagatggcaaagggaaacagaccctggagctcatgtcccagctgcccctcttggcagctctgttatttcaggtgatgtcagtagcctcctgagcctcatattattggatattgaatgtgggtaataacgtggatctcactgggctgtcgtgagcattaatgagttaatgcctgcaaaggatttagatgtggcaggcccacagtgagtgctcaatagctgacagccagaactgaagccatcccacggttccctcccccaggcccccagcgcacagtgaggattatgttggatcctgaggatggagtatgagacaaaaatggcacaagagcaccattgcccgttgagtttggtatatctggacgcatcatttttttggtgagtctgacatagcatttccctccagcgctgagacacggcatccattttttctagttgagtcctggatgaacgagttggctgactttaggggccagtcatatggtaggaaaaattgtctgtctttaaagagcacagttgcatttgcctgggtgagatgttcaggcaggagcagagcagggaagagcacagagtctgggaggctgggtgtgggctcccattccatgcttgtgtggggcccagcgcttggagagcagctgagatggccggtgctgtgtacacacagatgaaattgcctaggattaaagtgcagctgaagacttcattgtcttgaagacaaggtcgggggtccaggaaacagcattggatatattgtagcccatccagaattgggccttttaaaattcattttcaaccttctgattgtatcaaggagaaagtttcaagttccttatagggagtccttaagcactaatgagtgctaatctctctctattttattttatcttattttattttattttgagacaaggtctcactctgtcacacaggttgaagtgtgatggcatgatctcagctcactgcagcctggaactcctgggctcaagcaaacctcttacctcagcctcccaagaagctgggactacaggctagtgccaacacactccactcatttattttttgtagagatggggtcttgctatgttgcccaggctggtctcaaactcctggtctcaagcaatcctcctgctttggcctcccaaggtgctgggattatagacaggaggctctgtgcacagtcaaaaatcttttttttttttttagatggagtctcactctgtcacccaggctggagtgcagtggtgcaatctcagctcattgcaacttccgcctcctgggtttaagcaattctcctgcctcagcctcccgagtagcttggattacaggcatctgccaccctgcctggctaatttttgtatttttagtagagatagggtttcaccatgttggccaggctggtcttgaactcctgacctcaagtgatctgccggcctcagcctcccaaaatgctgggattacaggtgtgagccaccgtgctgagccaaaaatctctcttttgaaaaaaaggaaatccagccccacagacagcctccagggctctgtatcttcccagaatgtacacatcgtgtttgttttttacgtttaggattcttggctctttcttctggccagcactggtgagctggtggccgagtatcctacctggggcacgagcctctgcagctactctaaaggtgaaatcttacagagtcaaaatcggccttgaaaaccctgtaaatatcctgtaggacagtgcccatgactctgtggatttaccctgtgcatccgttgcatgtgcatccgcaccgcagacgcaggagtgctcagcgtctaacagagtgtacgtgccaagtcacatgacggtgcttcttaataacatctttattgccatataacccacacaccataaaaatccatccttttggaaacaattccctcttctgcctcaggatgcacgccttgtgcacgggctttagaggttttagtagaagcacaaagttatgaaaccatcgccacgatctaattccagagcgttttcatcattccccaaataagcctcacacctgctagctgtcagggctcttcactcttcaccatcactaatctactcctgtctctagggatgtgcttatcctggacatttcatataaatggaatcacacaaacatacaaaatgtggcctgtttttttgtttgtttgtttgtttgtttttcagaaatgggtcttgttctgttgttcaggctggagtacagtggcacaatcatagttcactgcaacttcgaactcctgggctcaaggcatcctcctgcctcagcctccccagtagctaagactacaggtgtgcaccactacatctggctaattttaaaaaacgttgtagagacagattcttactatgtcggccaggcaggtctcaaactcctggggtcaagcaatcctcccaccttggcctcccaaagcggtgagattacaggtgcgagctactgtgccctgcctggcttttttgaattgcgtatttttaagatttttccatgctgtggcatgtatcaatatttcattcatttttatgtccaaatactattgcattgtacaggtattccacattttgttcatctattcattatgtgatgatgtatttgaaggagagagagaagcaaaaagagacggagacagaaagagtcagaggcagagagacagagataggcagagagagagagagaacccagggaatcctgacactggaattggtagggtcaagagcatgtctggggtaccacagtatccaaatgggaacctgggtcagagcaccaggcttcttgccctcacttgctgtgtgactccaggccaaccccttaccctctctgagtatcaatttgctgatagagaagaaggctgtggatccccggaaacatctctaagctccctctcttggactttctgccttcctggcaatgctgtgctgaggggtaacacaggaaagcttatcagctgttgccacctggctggaagaagcttacagtatcatttcctaaaatctgattttgatgtggcgggggtagggtgctgcctaaagagtccataggagtcttttagtttgaaactgtagaagcccagttcgaaatggcttaagggaaaaagacataaagaattgatggctcggtcactgaaaagatacagggaatgtctagctgccagcctggggtggagacagccaccaccactcccatctctgagatgcatgaagtgagtgcatgtgccccactgcaactgcccctgcatttgccgccaagttgccatctgatggcagtgactggggtcagggagagggaggtcgcatggggccgggggccctggaggactcatctggtgggggggaagggcaggaccaagcatgtgccagtgtctcaccggagttcaccaacacatcacaagctcaaagataaaacttaagaatttcaagacagtgacggcacggtatgaaatgccttctgattctgtgccagccctgactgttctttataggcaatgacaggttgtcaagggtaatcttaagcaggcaccctgtttactttcgtgcaccacctttagaacataatcctctttgcgccctcagagatccagaagaaggtttggtccgtgtctgggtgccagcagagccggcattcacattttcagttatgatttcctttttctctgtacatcgttctttctttgtgtcttcagttttgctgggcacaggcagatggggtcttggaggttaaccttgcctgttgtataagtccgcagagtgggccccaaagcccccctgctggtcccagtcctaactgcggctcaacaaatgcatagccttgaaccatccagccaccagctgtttcttcatctgtgcaaggctgaagtggagctggctcctccacttttcagagtctgagaattgcaggatgccctctgattcattccccccacctcctaccccacccctgcccagtcctgacccccacacccatcccattctcctctccttctccctctacctcctgctgcccagaatcttctctcttgtgctagccctgagttccaacagaaccctgtggccaggtctctggggagggccacccaaaggccccattccaaaccctgcagatcctctggacagggagtggggagcaggcactgaccaccccagagacagcagagagggatacatgctgagagacacatgctccatccgtgtgacttttgcttctcggaccacgtgatgctgaaatgtgattcatcaatattttgtgcccagaagccatctgcagaatctaacagcgaggagcttggtgcaatgtctgacttcggtgtctgctgaatgtgtgctaattccctttgtacccaacacctctccaaaaagaaggtgtcaggtgggggtgggagctaagggctgggaggcagcttcctgggagactgcagcagaggctggccacaccacgggtgtggaatgagtgaagctgcagtctggaatgagtgaacctgccaggactcccagggatccctggaaatggagattggataggagctccagagagggagggaggagctgggatcaaggggatcagaggagactgcagactgaaaaacacaaaacagaatgagccaggcagagaaggagagactttggtgtgaaaggcccagccccactcttcacatgtcttcaatagatatgtactgagaacctactgtataccaggcacagtgcccaggcctgggcatacaagattcccaaggcccctgctctactggggctgatgctctagctggggaggggtgatggatagtaagcaagaaaacaatggtaaacaagaaatccatattatgattgagtgttgtcaagatgattaaacaagggcattaagtagagagtgtgccaggagtggaggggctgcttttccttgggtggtcagggaaagcctcatcataagaatgcataacatcaaaacatgctggtcgctgtcctcagctcgtttactgttgtagcagacaccaatatgtccttattaaagcagcttcctctccctcctggtcaaagaaaacgaccacatttcccagcctcctttgcatttaggtcctgccatgtgacttaaattcaaccaagcatatgtggctggatgtaatgcaagcttcttataggtctggcccaaagaacctccaaatcaacatcctcttgttccacctgccagccagaattacagatgccagtggagaaggtggtggagccaaaagaagatcggagcctggatccctgagtcactgcatggaaggcagctgctcaacaaccatgtgagctggaaaacaacttctattatgttagccatggagacttagcagcgtaactgtcagttccagtttgcctgtaattgtcctggttttagcactgaaagtcctgcttcctggggaacccctcagtcttaggcaaacctaaatctaatcaccctagatttggaggtcatttggtatagcaattgagctgccctgactggtgtgtgacttataagatcacacaccaatcttataagatgggtattactattatcctcattgtgtagatgaataaactgaggctgggaagaagttatttctcaaggtcatcttccagaaggctacttagctagtaggggagccaggaattaacgaggaagtctgtccctgagtttgcacttcaaaccataaggttgcactttcttttcggggtcctagtgaaaaatgagaaaggaaaaatctggtggaaatgcatctcaaaggcaacctgaaaactcctacttcagaatccacctatcacatctgtgtctattcatggttccctgattatccaaggcagacagaagcatgtccctctctggggaattctcaaaacatcctctccctataatatctgcaagctgtatcttaaatcaatttttccacagtggagggtggattccacaaagatggagatgttgttgtttcagatttatattccctggaatccaacactacctccagcctacagtagatgtttaagaaatgtttattgtgagacccaaacatttaccaagagctgaaggacagtgcaaaggagagtaacagagagatgcacaaaccagaacaaagtagaagagatgcgtggagaggcagagacagacgtggcagagagccatggtcatcacaacccctccgagtccttatccataaagtgaggatcatgatctggctctctgcggtctaacagaccagcctgcgagttcttctctgtcgagtctgcagtggtcagagacagctctgagccaagggctggtgttcttggtgggagagtgatgagagacatctcgaacgagacctggtgagctcagcgttctaatttggattcttcaggaaacatctgattacttggcacagggagaggcactgcccagcccaaaccgatgattttccttttgaacaaagggataagtcactgtgatcccctgttaactgcctggcaggattccttgggtgtaccagggagttctccatgcaacttgggtatcaccgggaactccctaccttcctggttggaatatgtccctttatttccccaggaaaggatcccagaaaaggagagacccgaaaacctgagctgactggacacaaggaggagaagggacgggcttcatcatcagacacacaggaccctttcatttctggagatgcgattcgatgtgtcaggctgtagtatgggataggggtctggcttagccctgtcttccatttctcccagcccactgactagttcatgggtgagcactggacccaggctgatccaatctgtgcaaatcctgagacttttgtagattcttgctggcaatgctgatctggtaggatttcacccttgaggtgttggatacatctttatcagcacaaaggcagagcctgccagacagtgaagccaatatagagggaagccaagagctggagggcttcctgaacacattaagcccctggatctacctatacctgaagctggaatttcttgaacttttttgttacttgagccaataagtccccatttgtagtttaagtcagtttgagttggaattctgttatttctcgcataatgaactggactgtatattttttctgttagtcaacactaccaagaagccagcataactggggaaaaaatagtctcttctaaggcgggttactgggagaattatatcagacagcagaattcagaaatgcacctgagagacctgcttagtcaaagtccagcttctaggaaggcccattatttaaactgtcttgaactctctctgtgctggtcactggttaatggtgcatttgtcttcaggcccactgcctgcccttctgctgggctctgtcccagggagcccggccccagcttccccagactcccttgtctttgggccaggtttggccagtccaagccactgctggggccatggagcatggaagaagggagaagccagggtttttctcaccctctttttctgccagggggcaaggctatgccttttctgtggctctggcaccctctgtggtctcttaggccaaccttagccttgctggctcgctccacaccagtcttcagcctggcccgccagccggccgctacggggtgatgaattactttcttccctgggaaaatgaatgttaaagttacctgttcgtcctttgctgctagcttcagtgtggttaggagaaaatagttaacccatttaagagtaaatattttgaggttgaacttaccagagacagagccaagcaggtttccaccccatgaaagcaaacatggttcagtagcatccccacagacctgccatttcgctgctaaatgggaaagtgtctgctaatgatattggcattctggtgactggaagaagtcctattcaggacaacaccaggacaaagttcccagtattttggttcatatgcatgtaatagatcagcccaggacaaagtttctagtatttttgttcatatgcaccttatagatagcccaggacaagatttctagtattttggttcatatgcatgttataggtcagttacattgatctatgtactagctggggtacaagaacatgtgtaaaatatgttgatttcttatgcctgtgtaaggttaatggcctaagccagaattactcaagggcttttcagggaatccgtgtcctcatgtgccctgctcgccgtgcttagattccaaaaagatacagtgcaaggaaaggtgaggtgagctgcacaatttttgttccggaacaatcctctggtcatgaatcccaatactttttactgccctgataaattagatgggcatttactgccttctctttgcagtgtgggaacacaggcctaagaagaaaacaagaaaggagggaggagggatgaagaggtaagcggtaaatgtcaaagtcggcctggcccaagccctgagacacgagagcagcttgtgagcagttccaggtttcaggaggaatctgtcattcatttccaggcacgccatgtacttgaaatgtcattgtctctcacctgtctgggggagctgagcaagactgaggctcatgtaggctccttcctccccgcattccctgtcagccactgtctacctctgtccccagcggaggaaggtgattggtggacatattgatgtgtatggagggggatgcatcctgattccacgagggaagaatatgggaactctacgtttgagatcatcccagacctcaccctttgtgcctcttcatttgcctggtcctgatttgtaacctttataagatcgtaaccatccatatagcacttccctgagttctgcgcattgttctagtaaattaggaaaactgagtggctcgtaggaatcccttatttgtagccagttggtcaaaagtgtgggtggctggacccacaagtgaggggtgcagcacccacttgtccctctcaccctgcatcagccaagtgggatgagaaacagccggatgccaatggccaaagggagctcttgcatggtccacgtgccgttgaggtttggctctgccaggggaatggacagacctgggctcagtcctggctgtgcctgctgctagcgtgttcctttctgtggcaataagattgagaacagacttgtgcgatctgctgagactgggactcatttccaagtcctcacttgaagtgccctcagaaagaagtgaggaaggcatgctgcaatacttcaacgccattcccaggcacgccacctgggttggtgcagactccacaagttcaggacacggtccccaacaagactgccctcccttcacacaccagctccaagtccggccacccacacttttgaccaactggctacaaatcaaggattcctacgagccactcaggtttcataatttactagaacaatgcacagaactcagggaagcgctatatggatggttacaatcttataaaggttacaaatcaggaccaggcaaatgaagaggcacaaagggtgaggtctgggatggtctcaaacgtagagttcccatattcttgcctcgtggaatcaggactcatccccctccatacacattgacgtgttcaccaatcagcaagctccccctaggaacccagaacaaaagccagacacattccttaataggaaaacagggtgttggacacaatcctattccagccacacaccaacccatcctcccctctgctaccgcccagcggtctcctcccaggttagagaccaaaatgcatcagcaggaaagccgaggttaataatttgagtggacagaaattgttttgcctatgctttatccatttctcctccctttgaggtcagaatgtgtgtttttcttgggaaaccacctgtctctcactctcaccttactcgggtgtcctggactgaccctaggtgtgagtaggtgacccaggcctggccaatcagagcatcagattcaccagctgcctaggaccccagtcggttcatcaaaatgcaagtcttaaattgtcactgagattgttaaacagagagacattctttttatgctggattttatgttgagattgttaaacaagagagatattctttttatgctggattttatgttgtgataatagaagctgagaaatgcttggagacaccatatagagataatttgcctacatagggagccacaaaatgcaaacagagataagtgattaaaaagccagaaaggccgagtcctgatgaaaagatttaagcccttggatctagccaggcctgaaatccatcagatcccctctggacatttcaatcatggatccaaagaatttgtgggagtttttttttgttttgttttgttttcattttctttaaagtccagcaattttacttgaacttggtgttggtcatgatgggtcactattcacaggatgcagcctgctcttttaacaaataatttccaaggttttgtttttggaagtttttttgaattattattttcggtatttgtattgctcccttgctgcattgtcttttttttccttgagagattccttttatctgtaagttagttcttgtctctatcaacacaattttttaccctctctcctaatttttgcttcatctgacccttccgtccactattatcttctctgcctcctaaaatctttaagacaattattttatcaacaatccccccttctccctaacatctccagatgactctcccagtccctccacggaccagccttgcctgtaatctgactctctttgaggacaagcagcccctctccaaggaagctctctttgtttccctcacaattcaggcgctccaagtctagaggcagggtcagccccctctctgtttttcatgacaatcaatatatcactttccttcttcctatttcaaaagcacatcttgcttgaagctcttgccatgtgtctttaactcccgtccaacattctccgcccctcatctggaaacatcccactcagtcccctttattcagtaaagactgaagctcttggctcactcttttttttttttcaatctcatctaaggccctaacatccactcaggttccaatcctggctccatcctttattagatccattactgtgggccaggtgctgaatttgcttgtgcctcagtttcctcactggcaaaataggactaagtggtccttacatagttgttgtaatgattgaattaaagtgcagaaatgctcagaacagtgcgtggcactaaatgtagtctgttattattattatcatcatttaaatttttatctggcttggctggaggagcacaagtaggcccttagctgaagctgaaatgtgaagactttttaaagaactctgtgatttgattttggtgtcccagaaggtagcatcctagaggtattaatttataaaccattcacaggaaataaagaataaaatgtaactccttgcaagagggcttgtttatatattttataagtagactttaccgcttccaactactgatcaaaccagctcgccatcaactcatgataaaaagtcctcattggtaacaataggggaggaaacaggagcatttcctacatccaccttggtgattaccaatgtgtgagacctttgcagacccatggatgtaccaatatcctccaagggtgtgttggcatggccacctcctcccaagacctccccataccacacatcccccaccaccggcatctcatgcccacaccatctgatatggtttggctgtttccccacccaaatctcatcttgaattgtagttcccataagtcccatgtgtcatgggagggacccagtgggagataattaaatcatggggcaggtctttcccgcgttgttctcatgatagtgaataagtctcatgagatttgatggttttataaagaagagttcccctacacaagctgtcttgcctgccaccatgtaagaagtgacttcgctcctcatttgccttcctgcatgattgtgaggcctccccagccatgtggaactgtgggtccattaaacctctttcctttataaattatgcagtattgggtgtatctttattagcagcatgagaacagactaatacacaccctctcatcctccctgaactttccaccggcatattctatctctggatttcacatcatcacacaaggcattttctgaaaactcctgtcaccccctcctaaagtgatttgtcaccagcaaatagagtgatgggaggagcctctttattaaccaagagatgattcatagggctgcacacaaagcctgtgaaaagcaatgtttattttcttgaaatgacataaaactatcattaatcatcctacccaacccatcctgagcgacctcctcgcttgttttaacttctacaaattaatgtaaatcactagattcagggtgcatatttggagtggagggtcagaagagccggccagaagacctttgcttctgtttctataaaacatcatacactaagaaaaaaacacatttccatttctttctttcctataattggtcaggggtcttccaaactcgagtctgttctttgtgaaccaacatagcagaatttaattttgtaccccttctcccctcatagctaaaccttgaacttaccgactggagtgaacaatgaggccaccatatggaggacagcatcctggtctagaaaaacaatctccataatgcaccagcccatccaaaaacagactgaaattatatgttgaagcacagtggaaatttcctcctgcatgttttatgtaaacaagttcatttgttcattcaatgaatccacagttcttcaaaggctctgtttatattaaaagaaagaagcagaaaaatttggattggcgggcagccagctctacacctacagagttgtcaagctgttagagcaacattcgggagctccgatgtttatgttgagatgggcttttaagccaaaagtaaaatatttttttttggatgaaacagccagatatgtgagcaatggactcacatcatcagagacaaaaagaccagtgttttgcaaaagggcagaagctgagctggtgatgggcctcagaccttgcgcagggcccgaggactctgtcttctcatgtctatggagcagcatctcaggggtttctacattagacagctttaaagtaacaaagaagagcgagtgtctgaggttaagaccttgacacacgatggtctctaggctgctgacttgaatcctcaggaaaaaatctacccaccaaaggcctaaaagttgggttctttccaagtgtgatattttatatttactatttagaagaccatgcagtaatcaaatagcagcttcaagagaggctctatgagaaagagtgtcttgtatccatcaggattctgtggttgcaagtgacagaaaatcctaccccagttggtttaatccaaccaagtgtttcattgaatcacagacttgaagcaggatggggatttttgctttgggtgtggctggatccaggaactcaaaggatgtcaccatgtggctctttttctctatttttaaactgtgcattcccctgagttggctatattttagggtagatgttcactcgtatgaaggtggccagcggctgctccagctcagcatcgtaacttctcagcaactgcagtggaaagagagcactgctcctgcagttactgaggccgatacctgagaattggcctttagtaactttaactgggtcacatgtgcatatcttaaccaatcactgtggtcatgggatagagacttctgattggtcagacccaggtcacatcatagccctggactcaacaaaactacctgcacagggagtggaggaggggtggctcgcccaggaaaatagggttcattacaagaaaaaagggaagcgtatttgaagcaaggaaaatttggtctgaaaaacatttaaaattgtaaaaaaaaaaaaaaaaaaaaaaaaagaaaaaaaaaacagaaggaaattgggtatgtttactttgagaatgagaataatcatgattatgacgaatcctggaatcttaaagttagcagcatcttcccagattgagaccaatagtttccagacacattttttttttagagccacagacctcttttgtcaaataaaatctaaagtctgtgggaacgtccatgatgaaaacggatcgacactaagctatttagttaaaagaggaaaagggtaaaaggaggaaaaaggcccaatgtcccaccctcttagttctcccaattcttccaacatcagctcttccttggaaattgagggaagacaataaaaaaaaactgctggggcttcaaagatgactttagggagttagaccctgaccaagaataacattgactcataccaagaaaaacttcttcccagatcaattctctttcaacctcatcaaggagaaagtcaaaggttaatgctaatacattttaataaatttcatagcccttgctaatactcatttgaaaaatcagaggtcaggttatcaggatcacagtgctctgtgggtattcggctagaatttactatcaatattttcttcttactgcttttgttcttactatttccttctatttagggaaatgattctggttttccattttatgatgatgacatttacatgtgtgtattttcttattttttcttttcagtgaaatttttttttgtattgtggcaaaatatacgtatcacaaaatttatcattttcactattttaggtggaaagatcagtggcattagatgctttcacactgttgtgcaactattaccacatccacctccagaatttgtttatcttctgaatggaaactgtataccctctgcaactcctcactccctccctgcccctagcccctggaaagtatatatttcttttaaatccatgtatataagtaaaacacacagatgtaggcaaataaaaatgtttcatagattacagtacagatggtgcaaagggaaatggataaaattgtgagagatgtttggaaaacactagaggagcttagccctcctaaagataaaaccctgtctacagtatccctgcaaactcacagccatggttcgaaccttgggaataacagagtttcctcctttgcaagatggcctgtttcattttgcacatggttctagaaagttcttccttccatcgagctttggcctgaggactggcactgcaccaacgggtggtgatctttttcctttcccactctaatgacttggatattcgggtttcgtggccgtgttaaaggtctcccttcttagctaagtatcccatgtttgcttgcagattaacaccaatggtgccgtgacatcgagggaccttttcagcctgcccaaccctgacattcccatctctggccacacctgcctggtcttctcttgggaactgccttaactctgctgtcattcatgttgattagcaaggctgactctaccccatgacccagagctgaccaatcagagcagtccattgcccaagccacagtgattggctcaaaggtgagcatgcaatcatgcatggtcattaaatccatgaaggtgctctacccccagcctcaccaaccacctagccgtaggggctgccatagatggctccttaccctccctttaatcagtggctttgggccttttaaattctgaaaacatggctgtgtccaaagataagggacacatggtttttacccataatttctttagtcatgatttctaacagcccctgccaccaagcctgagccccattctaaacgagttaacccattctaatgagccaatacttgtcaccttagaaggaagatgacaaatgttagctcatttaatcttcagaaccctgtgaggtacctcctaggactatttttattttcaggtgaggaaactgagtcacaaagggctgtaataacccgctgagggttccaccttggcaggaatttgaacctgggcagcccagccctgaatcagtcctcacaccacccatgatgcggccctgagagctgctctcaatgccactagcagagcgatgtcacgaagtgccactgtggcttttactgtacaggattttctctctttcaaagttgactccatgccagtactggttgctctgcaaggtctctcaaatagagtgcctttgatcctgaaccttttcttggaagcctctgaagggcttcactagtctaggggccactgcagatgaccatctttctagcatctcagctgtctgctctcatatttcattatctggtccacaaggctggtaacaaacactcaagataaattctgtcctccctctctggaaaatagaaaatacattaaaaatctcagcctgtgaaactgaaaattccagccaaggggcccatgaggccccagactgggaaggcccagttcccaggagacagcagagtcctgctccgagataacatcacccttctgcccacacatgcagaggctgtaattataccccttaacctggggctttactttacttaatgagtaatttgccaaaaccatgctactgtttgaggcatgaacctggtgtgtgaagggttcatgtgcttctatcccacctgtcatcttcctctccaacatctgggatcctgggagaaaatgtctgtcaaccacacagctgcctcctcaccctcctgcccccaggtactctcctggtttccccagcatcagagttagctaatgaaagaggccttcaaaacatttctcaaaaagcatgggcattgtggaaaggggagagagaagctgggtttagcagtgagcattagtaggggccatggttggtcagaggacattccacaccaaggtgccatcatgcaggagagtttgaggacagccagaaagtcctgtctcttcctaaagaggagactacattcattgggcccactctcctcaaggaggttgcaggagtgagatggtttattagggccaaaaatggacctcagtgagttgctgaatagaaggcctttgaattggccaaagcatcgttgtttgaggaatagataagcgttcgtgctcctttccttaaagatcttggaagagacaaaacccagggtctagcagaaactgcttgctgcccaccccctatctagtcttctcttcttctttggaaacagaacccccagtttaactggatacagggctccctagaaggaagatgactttgcccaccctccctttactaggtgaggtcatgtgataaagtaaagatcaatgtcatatcataagaagtctctggtgaggcttcagggtagagaacaggttcaggaggaatatacaccttttgtgctctgattccattcctcattctagctacctggaatgtggatgttatagtggtgctcgcagccatcctggattatgaagtggccatgaggactaggaagtgaacccgcatggataccgaaatccacaaacgctcaagtcccttatacaaaatgaagtagtatttgcatataagctatgaatatccatagagtagcagaaataggaaagttctgtggaccctattgacttcatggaacttccgtatcagtcatggactgtttatctctcaaacttcctttaagtagagtataggagtgcatccctgtgtcgaaggctctcttgtattgaactttctgttctatgagattggatctacccttactgatataggggactcatgaggcttctcagggaggggcagagctctgaggatcaagccaacactccacagcttgcacttcaggtctctcgtggtcagggaccaacacttccactgaacgccatgccctcctgccccaggacctaccaggctctccacccagcctcttcctttgcacccttcctgtgcttgtcatgctttccccactttctgacctttgcctttgcagaaagtcttgctggggccaacctcactaccttctctccacaaatctcaccatgcctcatggttcaacttttgacttttacctctgtagtctttcccagatattctggaagatgccttgctggattgacctatgagcattgaaacctgtctttcttttcttgttccacacgggcaagggtttcttaccccaggactgtgggatctttcagggaagggctggcccactttacttctctctttgcagcacaggccttggttggggaagtttcctccacgtatttgcagaactgaactgctcgggacggttctgtctcaggtggtcctggctgggtctctccaccagattgagtcaagagaatgtcttttccagccacgtgcagaagagaactcaagttcaccttaatgaatgcatatttgtgactccctgggaaagtttaatgtgacacgaaacacacattttgcacactctgctccacagcccagcatgcttgtccacttcagcagccagactctgatcctcatcacttttgacaaagctctgtgagaccaaccctgctggcctctcttctcactgaatctagccctctggtttactctaccccggccaaactggcccccttgctgccctctgaacagccaccacatgcgtgtccctgtactggctgttccctctgcctggaatgttcttcccaaatctcaggcaaatgttacctcttcagtgaggccttcattagccagcccagctaaaacagctgcacttcctacacccccacacattccccactcccaccactcactcactctctatcatacttttctttctcagcacataccaaaatctggagtcattacctgtctttttctctagaatgtcagttccatggaatcaggcccacttttgtcttttctccactgtatccccaggacccaggacaacttttacatgaaaaataaatactgacttactgagtgaacaagtgaatgaatgaatgggtgagtgaacaaacaaggtgaattattctacctctttcaaactgtgactccaagcaagtcagtgcaccttgccagcctcactttcatctgcaaagtggtgctaattaaagagagattagattcttttcctccaaagcttgtacaaagagaagctgttgctaaaccacgcattgttatgcagaggttatttaagccaattaaattaagctgtcacactagccctgccagcactctccagctcgttcacacgtgagtgggtggtgtcttgcccaacgtcccggagcaggtctctgcagagctggcttctgggctccttcctgggctgcactgcagcccgggacatcatctactcagaggtgttgactgagcccctatcctgtgccagacattgacatatgcactgaggctacagccgtggagaagccagactctcctctgcaagagcttgatctagtgaaaaaacaggtgctggaccagcaggagagacaacagtgcacaggaaacatttctgagctggggcgagttggctggggcagcaacccaggcagagggcttctggaaggcctctccaaggagggggctggatcctgaagggtggacagagattagccagggagacaggaagggaaggctcatccagtgagggaacagtacaggccaaagcctgaatcatgagagaagggtgaacacaaggaaatgaaggatggcggaccgtagacaggggagagacgccatcatgcttctggcttcaacaaatcagaagggtccagggattcaaaggggcagagtagacccagagacccatgaggcggccccagagtggtccaagcgtgagatggcggtgctttggactgggtgtttgaatctttttttagtaacagctttattgagagataatttgcatatcatgatgttcactcttttaatgtatacagttttgtgcttttgattaaactcgggaagttgtgtggtcatcatccctatctattccagagcattgcattatccccaaagaagccctatacccatgagccgtcactccccatccactaccctcccaccataggcagccactgctactgtcggcctctgtggatttggctgttctggtcatttcatgtaagtggaatcagacgatatgggatcttttgtgactggcttcctctgcttagcataatgttttcagggttcattcacgtggtagcatgtgtcagcattccattcctttttgtggtagaataatagaaatagaataatactctgaatgcatatgcggtagtcccttggtattcgtagaggactggttccacgaatcctgccagcctcccttctcactgaatctgccccctggtttattccaccccagccaaactggcctccttgctgccctctgaacagttaccacatgcatgcctctgcactggctgtcccatcttggtatcctcatggatatccccatggataccaaagtccttggatgttcaagtgcctgatataaaatggagtagtattcacatttaacctacacaatactcccgtatactttaaatcatctctagattatttataattcctaatacaaggtaaatgctacataaatagttgttatactatattatttagaaactaatgacaaggaaaactatctatatatgttcactacagacatgatcatcataggactgactatattcttgatgtataattggttgagtcctaggatgtggaaccgtggatatggaaggccgactgcacaacttttcattcttttttgtttgtttgttttgttttgttttgttttgtgatgaagtctcactctgtcacctaggctggagtgcagtggtgcgatcttggctcactgtaacctccacctcccaggttcaagtagttctcctgcctcagcctctcaagtagctgggattacaggggtgtgccaccatgcccggctaatttttttttttttttttttttgtatttttagtagagacagggtttcaccatgttggtcaggctggtctcaaactcctgacctcaagtgatccacctgcctcagcctcccaaagggagcttttcattcttgatccattcatcagttgatagacatttgggtcacttccactctgggctattatgaataatgctgctgtgaacatttgcatgcaaatgtttgtgtggacgtgtgtttttgtttctgttggatatatacctaggaatggaattgctgcatagtgtgtgaactctgtttaactttttgaagaagcatcagactgtttgcctgagtggctgcacactttgcattgccactggcaatgaataaggcttctggtttctcacaacctcaccaacacttgttattgtctgtctttttgatttaagccatcttcgtgggtgtgaagcggcatctcattgtggtcatgattttcagttccctaaagattcctgatgctgggcaactgcatgtgtttactgggcatcctcatatcttctttggggaaattcctgtccctctgctcccccaagtggctgctaggtggctgctttctatagctgcttagttgaggtggttggttttcaaggctaccacggagctggggagatggggatgggttagggcaagttgaaacaaagcttgttctttctgagattcagcattttcctgaataaacatccttgtacagtttaagcctttggttaatatccagagttctgaaaagtcgattttgacagttgctttttggccagtgttcttattgttttatggaagagtagatttgggaaggtctttactctgctattctggaagtgcctttaattgaagtatccataggagttaatatctattaagggcttactctggtgtcagacacttatctaagcattttgcatatttaatgcccccacagcccaaggagaaatgtattattatgtccattttagagatggggaaactaaggcattcagtgactaaaggttaagtgacttgctaaatattccccagctggtaagcaggtggggcgggaagtgggtgggaagaggaggagacagcaggcctctctctggctccagggcctgtgctttgaccacctcccgtcctgtcctctggctgctcatagagtcaggaggggcctaggaacccaggccagcttttccccagggtggggaaggaaggattttgcagctggggaagaacaagaggctttccttggtgcatgcctcactctgcctagctcagccatacatgctgtaaagccagccatgacctttccggaccaggggttggagtgggaaaggaggtgtgcactgggtcaaatgggcagcaaagaaggcaggtgccctgcctgtgagttggcagtcaagggagcctccatgcagagtctccattcccaccccaccctcgccctcagtcagctgccacaagtcagcccactcctgtacctgctgcagcccagcccaagagctccaaaagctggggctgtggagcactctcactgcttggcattttctcattggtttgatttgttgttggggtctgagtgttagatcagggagggcaggtcttgtgtgtttagctttttttgtttattgttgcttagctttttttccattgcaccttgaacgatgcctggcacatagcacgagcttggtgaccattttggggtaagtgaattgattcattcactaagaattaatttgctaagaatgggctgtcaacctaatataatcaacagggtcagaatctagtttaaagagaatttatttaagtgcaaagtgtgaggacaagctgcctaggaagcagagattccaaagaatagaagtcaatgttccaaactgtagaagtttgggatttttatatagacaaagcttagggaggcttaacagaattccaatctctttctatgtaaggcttaatgcatagttaaaatgatctgattagttgagatggcttttgttttccagaaaggtgaatttaacattctccatggaagatgtaactgtcacggggtcttgggcaccatctggtctgagttaggtacaggacaataaaggagacagttaatctataacaaagatcagtgattggaaggaggagaaggtctgttctttggtctctcttagtcatttatagcaacgagaacaatgaggaagacagttaagctctaatctaagaagcagaactgcaaatatgcagccgtggctcagtcgccagggcttaacttctcccatggcataatacttttagacagttctaaaattttattttcttttacagggctcacctgaaacaattatattttaacaaggcaatagtaagaacaacaacaccaattcccaccgagggctaactctgccaggcacagttccaagtgcattttgcatattatctcatttaatcctctgctgatgtgatcgtgttatgtgttattatgtccatttcacacctaagctctgtgtttgtgctccgaatttccatggaaggagccactcagtgctctaacacttggtgtgtgagtcaccccagaagttccctcccatgtccctgctggagtaagaggtgctatgaggcagtctctcctgcagggtcttgggcctagcaaagtccactaggccattggcttccaggctgtcttgtccctgcatgaagactgaggccgctttggggaactttctgctgctaaaagttaataattctttaaaaacacacatcacatactatgggcctggcattgtgctaagtgctttagatatgttaacattccatccccaaaactctggagtgaagtaggtgctataattatccctgtttttttaaatgtggaaacagaggtgcagagcagctaaatatcttgtccaaggtcacacagcaaagtggcggagacagtctggcctctaggtctgtcctctttaccactgctccagactgtcttttgatgaaactgcccctcactggatatgaagggagacagagatggtgacatggctggagagggtgacagtttccccatcgcagcatcaatgtgtcagttaggacttgtttggttgcaagcggcaggaagccatccccaacaggctcagcttgaagctgttttacttcaggcatggctggatctagaaccccagatactggaattaggaccaagtctctttcagggttcagctaggattacctctgtggtggctgcattctcaggctccatgggttggcaaggtgagtgtcaacaattctgcacccttgattaatctcacctataaaccccgtgggaagagacagtctttctctaatccctccggtgaaaagcttggaattacctgtctttgaatctgattggatagccttgagtcaggagcccccccccctcccccgccccccgttaaccaatcatcatggataagggaatgaagcagttctctgattggtcagtcctaggcattatgtaaaggccgacagccaggtgtgggccagctccaactggggcgacttgtggagggtggttcctgggacaacgcccatgccgtgatcaggaacggggtcagcaggagtcaggtggggaagtgccaggtgtccactgccacgaccaacacgttactcacactcacggcacaagaatggcctctgtaccctgtgtgtaggtaggtcagaagcttttttgtttgtattttatgacttttatagagttatgatgacatgtatttttctcaaattttcatagctgtctctctaatgaactacaaagtagggcgttcatggtccttctgggaggtgtgtgactaatgcgggaatttcaagcaccatgacagggcgaagggagcagaaattctgcaggaaaaccggggggcggggagaacagtgatgtgacatcattaggctgagaaagaggtagatatgggtcctcgtagcaaacaggaatgacactggttaacattgaaggtactctctctcaagtgtgtcaggctctgtcctaagcttgacctgcatccttccattggaacttccagacgactctccgaggtggtgtcccatttctctgtacaggcatatccaggcacagtcgcttgtatgtctgagacctcaagctggagagtgctgatggccaacatgctggtcacctctccacagtccttcctcctcctggacaacacccctgctctctctggatggtcctgagctaagcccggaaggtgaatcacaggggtctaagtcaatcgcgggatcccacctctctgcctgtgattggtggacattgagccacttctgaccaatgacgtgcaagggatgtgcttgggggattctgggaaaatcttttctctgtaaagagagggggctcatgaggagcatgttttctcccctggcctcatcccctcctgccctgggcattgtcacctgacccctcctccccacctccactgccaccaccttaatccaaagcacagcatcctgtgttcgtttgcttggaatattctggtcttctcctccctggtctcatgcagcccgaggattctgctcaaatccaagtcaggccgtgttgctcctctgctcggagccctccagggatttcccatctcacactgagtcaaagcccaagaccccatcactccccacaggaccccactgacccccgcccctccccgcaccctcccctgcgtctctcccttccactcactgtcccagccaccctggtttcctcacaggcccttgacctccccggcagctccgtctcaggcctctgcacgagctgctccctgtgcagggaatgatctaccctagtaacccccatggatccctccgtcccccaggtctctgttcacaagtctccatctccactaggccttccctgtcacagtgtctaaaatgcaaccctccccatgccctgggcccccacctcttcccagtttagtttctctgatacactacctggtacaccgagctatttggtttgctgttccgcttgcccaaccagaacagcagctctacggcggctttgtctccctcatgggcccccttttggggcctggggcagtgctgggcacgtggctatccccaaataaataatgactgaataagtgaatgaatgtacatgggggctgtgacaatgtgtgaccatgagggatgccttgggggccacatgaggccagaggagactgggcagtggcttggtgactctgtggagcccctgcctggccatggccctcccgcctccagagttctcctaaggggtaagaaaaggcctccattgctggcaccttcacccaccgcatctcccgttgttgcagccacaattttcttacaaggacagtggctggatttgagcccaggctgtgtggctccagacctaagcccagggctttgtctggggtgtggcccaggggcaggtccttgggtgtgtgagggtggcttggctcagctcctctccctaggtcactgcagcggccctgtgctgttctgttttcccatccagaagtcctgagggtctcagcagaggggcccaggatccaagtccatccactcccagggcgggtccctagccagcctctgcccagcatgtggtgtggatgctgccatatccttctgcttcctgaaatgtttcccttccagaactttccaggcccaggttccccatgcggggctgcctgagcacccccaccctatggccagccctgctgccctggcttccacctccagatccttcctgccatgtccccctccaatcagagccgacccacactgtgtccctcccagtggctctactgcctactgaacacgtgcaccatcaccgccgtggggcccacaggtaatgggagatgcccccaggtcctggtttgtgcttcgccagagccctcctagagctgcaggcgatgatgggagcttttcaaacaccagcagggcctagatgagctgctccagggacaggagtgttgcgggcgaatgagctggacgagggccagccctgcagggcgcgcagacttgcggctctcttcgcaggcttttggcccaaacagctctttggaaaagagcacaggaatggccccggaaggtgggacctgtttccatggtgcacgcgcaacattggaggacgatggagctgggactgctggggagcagcgagtcaagggaggggagggggcctgggtgtgggacacagggctgccctccgtccttcatacccactggtgccagctcacctgtcactcccacatgaaggccgaatcagtcaacattttccagagaaacagaatccatatggagagagagagagagagaaacttaaggaattcgctcataggattgtgggggctcataggactgtgatgctgagactggggatgggggtgtgaggggctgccacagctgtgtcctggcagcgccgagccagtcccctgtcctgtttgcagagtcaaggctataaagagggactgagaacaccgtgacgccctggcctgcgcaccctcctctgctccatctgggtctgtccggatggcagaggctcagagggtctgcccctaccagatggtggaggctcagaatgtctgagccagaaaaagcatgaaagaaaacttagccttcctcctcccagttaacaggtgagtcagatcccagtgccctgtagggactgcagaggcagctcccttctcttgcccttgactccatgcccttcttcttcttcctgcctagctgcacacatggcaccatgcaattcccctcctcctcctcctcctcctcctcacttctgctcatgtggggaaacctgtgccttatgtatcctgcaccccagggttcttggaccctggaccccagcctgtgggcagcaggccctccaagctccacccactgctcagcaccacgtccattaccccctgtccaagccactgtcctctcttgtcctggtgattaagacaggctcctgtggagtttccatgctgcgcctgcccccatgatccattctcctttcagccaccagagtaagcatgataaagtgcaattaagatgatgccactctctcatctacaatcttcaatgacttctcattgctcttggaatcaaatccaaaccccactgtggcttgcatgaccccctgtgatctggtccctgccctcacgacacatctctccctgttcactttgtactaagcacattcccacctcagggcctttgcatttgctgggcctgcagcctgaattgctttcttcccagaccttcttgtatctgaccccttttcatccttctggtattagctcacctgtcacccccacgtgaaggctgtatcaatcagcattttccagagaaacagaatccatatggagagagggggggtggggagagagagagagagagagagagagagagaaacttaagggattcgctcataggattgcgggggctggcaagtgtgaaatctgcaagcagacaggcaggctggaaattccagcaagagttaatgttgcagtctggagtcggaagggtggaaactcaggcagaatttctacgttacagtctggagtcagaattccttcctctttgagggaccacactctcttaaggcagcagtccccagcacttttggcaccagggacaagttttgtggatgacaatttttccacggactgtggggggttgggtggatggtttcagggtgaaactgttccacctcagatcatcaggtgttagagtctcataaggagcacgcaacctaggtcccttgcatgcgcagttcacaatagggttcatgctccttcgagaatctaacgctgctgctgatctgacaggaggtggagatcaggtggtaatgtttgctcacccacaactcaccccctgctgtgcggcctggttcctatcaggccacagaccagtatcccggtccacgggcctgggggttgggaacctgtgtcttaaggccttcaactgattgcatgacacccacccccactgtggagggcactccacgcgactcagaggctactgatttaaatgtcaatcacatctaaaaattaacttcccggcaacatctagatggattgtgatcaaacaactgggcagcttcacctggccgatgggacacctacagttaagcatcacggacaccctcacccccccgcccccacaatctaacggggatccctgtggcagatgctgttagttccttcccataaagcccggaacttgcagcgcgctgtgcagatttccaccttcatctctgtgcctgaggctatttctccagagtcccggaaggctgttctggtgggctagaaatgccaaagacgcattaccctgtgggagcggccctcaaccagtgactcttggtagctggtgggaaaatatcccaggcccctcgccccgcagcgggatgactctgagctgtgtgctctacactaacttgccccaggaggattgagccccggctgcacgctgcattgcttgctcggtaacaccctgtgctggctgctttccctctcctgtctcatttccccaccccttaccagtactgcctggatccccttccagacaaacgacttgcccttggctccatgctcaaagtcgtcgtctagggagctcaagcttggatgctccttcgttttcgctaatcactctctgtatgtcccctggtcttcttacaatggtagcccttgtcaaagctctaatcatcttgtttttatgtctgctttctttctgctcactggaaggctgggtcctgagggcacagtgtccagcacggaggacacacagtaaatattcccagaaggagtgatgggtgaacgaataaatagaatctcaccctgccaccatgattaaattcagccccaaacttacctgtcccattgtttccatatcctgccacctctgaggcctaatctgaagaactgatttgtgccagtggacgagcactatttctctaggtgagacatgcaggtgtcaacaggaaatgtcctgagatgtaattcttcaacccaggaagccactccaatcaagagaacataaagcaatggtgatgggatgtgggggttccatggggcttggatgccctgaggagggcctcaaatcacagaatgatgaaggtcttctggatgcagtggcagggcaggagaggtattgccctgggactcgagatgggaccacagccaattgctcactcagccatggcctgtgggtctgacactgggacctcactaaccctcttttaacactcctatctgtaagtagggatcatgacccacactttgcaggggttctgatgctgcaaaattctggcgctttctacatgataaggtctttgctcaccaaatggaagagactgcgtgcaggtagcatgggcctgcctactgcaggtggggtgctttgggctgcaagtaacagaaaatccaactcaaagtgaattgtgtgataaagacaatgcaccacctcgcttatcatggtctgagttcctccatgagggttgccgcctggtgcgtcctctgtaagctccctgaagcaggggcctaggctgaccttttttctccactgcccccgagagcatagaccagggcctggcacagagaaggcgtccagtgaggattccacccaggacaccatcaaaccctcatcgctacatggtctattaagttgtgttcccccaacagcagttaaagaaaccaaagcttggccaggcacggtggctcacgcctgtaatcccagcactttgggaggccgaggtgggtgggtcacttgaggtcaggagttcgagaccagcctgaccaatatggtgaaatcccatctctactaaaaataagaatacaaaaattagctgggcgtggtggcatgtgcctgtagtctcagctactcaggaggctgagacaggagaattgcttgaacctgggaggcggaggttgcagtgagccaagattgcgccattgcactccaacctgggcaatgagagtgaaactccgtctaaaaaaaaaaaaaagaagaagaagaaagaaactagaaactaaagctaagggaagataaattacctgcatgacatattgaagcacacagaggacagtcctggcattccctactctgggctctggccataaccctgacaaccctgctactctactgtcctccctggcctctctcaggccagtttgtcctcagatcgggcagtgtgggagttgacaaaccagtcaacccagactcagatgacgcagaagtctgcccaacacagaagtccaccaaccattgcattgtgatcattgcaccgaggacataaattcagcaacatgtgctgggtcagctgcctcgtttttctccaaagtagcaaatttatggggcacacgtgcacatgggtgattatttcccaatagtttatagtatcaagcctcctttctttcctcccaataaatctaatttatatggattggcagatcaaacagtgcatttcctggcatcgagaggctgtgagtcactcacagtgctttaggaaacttggggagattaaggttttgcataatgcaaatgcggatggaaacatatttggactgcctcgctgtggatgcaattagagcaatgagcaccaggagaaatactttttcccaggacacagcaaggtctgcttggtatgcaaagagcacagttatttgcgacaccagagcctggaacgtggtgagcaaagcacccagtgacggtttgatttgcagctttaaggaattcaaagatgaataaaacattaaattaattgccaaagaactgttgccaagcctgcatgagatctaatgaaggcacacatgcaaaaaaccaacacacacagaacaacaaaccaaaactgggcctgcgggatgctacctgccccaagcccccgaaaccacatttggttttgagtattttgtcctacttggaattttctctcatcaatactcatctcaagtcctctcagccacgaaagctctctccgcttcccccagcccacaggacgctccttcgactgtttccttgttcactggggaaatgttgactgagcacctgctatgtgtcaggcactgctttcccagacgctggggaaacagcactgaacgaaccaggccacaatccctgccctggtggctgccttcctgcggggagtatgataataagcaaaatagagaaattaatatattggaaagtgctcagtgctacggagaaaacaaagatgaagtggggataggaaatgccgggaggtagggtcaatcgcagattgaggcaaaggggtcagggaggtcccaagatgggggacatttgtacagatccctgaaggaggtgagggtggtgactacgaggaatgtcaggcagagggaatagcaaggggagaggcccggagtggaggttcccgagtgtttgagaacctgtggaagctggtgtggccgagtaagttagggggagagtgatggtgatgcacccagacaaggagcaggaccaaggtcacataaagtcaatgcattaattcacctttcaattcattcattcacttactcaacgaatcttttgaggctctactgtgagccaggacctgctattttagatcctgaaaatccaacattagacgtgacaggcaaggtcccagctctcacggggctgtgtaatggtggctgatccgggagcaggagggaagttactttgttgaggtgagtggggaagcccaatcgccactcgcctctaggtccacaatcccagcagaattccctcttttgtttgctcttaggtgattcttgtcttccccataagcccatttagcagatgagaaaactaaggttcctttggaatggaagtcctggcttctctccataaagtctggaaattagagggagtagaattaactcccttttcctttgcacagggccagcatgaggctttggggaggttctgaggcaggagacatcctacgtcatctccacaggtcatgaaccctatagcatctcccaccaagagggtcacggaccctacagcatctcccaccaggagggccatgaccagcctctggggctgtgctgctgcatgccaaggagtagctgaatcctaggagtggagaatccccagcctggaaggggaccccctccaccgactgccatcactctggggctctctggcttgagggctctctggggccacgaggccaggcctcctctccacgtccaaacaggctggctgggtgcaaaatgccatggtgcttgctctggatgggctggagttttccctattcaggggccagggcaatgggtggagggcctgggtagagaggcagagcacggttgcgtccaggctgtgccaccctgaccctgaactcaggcccacaggaggctccaggcaacagctgctctctcctctgctggggcctcctgcctggaaagcctgctcccacccacaatgcctagattcctccctccaagcagccttagagacccctttgggatccagatctgctctgctcctcaccctggggatctgggtgtcactttaaataaagggaccgctcgtgctcaccaggctgcgggatattcagaggctgggctggcagttcccatcccgtggtcgcagagtgctatggaggggagataataggtgtgatttctgtgcagaggatggacagggctccagggacagaggatgcaggagtgacaggcatcatcagataccatttgtccagcagccgctccagccacctggtgtggatgtggcctcgtgtccatactctccagagcacccggcttagtggctatctgcctggctgtctctcccattttcatgtgaaagggggccaggcaggacatggggtctggggactgccatctcctcctgggggctgcactgtgctgacagtcttgtgtccccctgacaggggctgcacagacgggccaggcagaagtgaaggagaagaaggaagccaacagaaggtggctttcagggctggtcacgcagagggtggattctgacgggcagggctgctgtgggtggtgggcaccatctatgctcatccctgcccaggcagctctgggctcccccagctcaggtgggccccctcctcacccagggcgcagctgtggctggcagcaggcattcacccccttctcagctgctcagccatggaaccaggagctaactcaattcctctgtccccaaagtctgtgcccaccaggccatccgcctcaaacacttggtggccaaggcctggggatggtccccaggctgcatctggtcagtggtcaagaggctgcacctctaggagcctcctctgtcactcacccgcccaggcctggacagcctggacactccagccagaggcagcccagagggtgtgggaggggctctctggggacagagcaggaggggacactgctgtgaccctgtagctgcagacatgtgtctccacgaagggaagaggctgctgtccactgtcgctttctgcagtgacactgtgccctggcccgggctctctgctgggttgcagaagtgcctgggtcaggacagctcgcatctgccttcaccgcagacccctctctgcagcccatctgaggcaatgtggcctctgctgtccaagactcacttcgaggggatccttttccttttttagtggaaacctggtgtcctccctttgagtgcttttaggggctggggaggaggtggctattggcggcagtgcgggggcttcatgctctgcctgcgcgcagcagagaacacggcttcattggtgggatttgtctggtgactgggcaggtgggtcgcctggacacgtgctcccagccttcagatgtgacaaggaggggaccatttgcggggttgctgtgtgctggggacagagcagaaaatgccaggcggcaccatttttcccactccccacccgcccgtgctcactcagagggaatgtacagatattctgtttgtaattaaaaagtaatttaattatccgctgaaaatgaggtttcagaattaatattgaaatgaattctagctgtgctgtatgatgtcttttctccctgctcattagaacatcgggaggggtgaggagagaaggcccaggaggaggggcgtccttcccaggcagctgtcacaggcccctagctgagctctcatggcagacacagcccaggacactcagacccagagtgactacgagccccggcaagacgtggaggagcagagttacaacccgtcaagagcctgatttcaggttgaaaccaggcttcaccatgcagcagctgtgtggcctcagggaagttactgaacccctctgagcctcccatggaaaataaggatgatggttcccctcacagggttgtcgggaggattcagtgtcctccttcaggtcttgactcggatgttgcctctgagtgagggcgtctttggccaccccatttaaagtgccaaccctgacacttcctccctcctttcccctctgtcctcttcctggctcttatcaccatcagacaaaccaagttttcacttcttgatcattgtccagcccctgctgtgaaatgtgaagtcctaagacacaggctttttttgtttgttacgttcattgctttagaaggaattaaggacaagctaccccaaatgacgtcactttggtatatggattattttgagctgcaggcactggagaaacagcaggtgcaggcagggccttcggacctccccttttctaaccaagaacaggccatgacatttcccacgagatacacactccctttgtaccaggaagagaacatccttatcaccaaacactgggagtggatgccgaggtgcatctgcacaaacacacttaataaaataaccctttgcttccaccagttttactcgtttctcccccacgaatcttccagttcctcccccacgatttactgcccccagtccaaacctttttgtctcatcatttcttcacaaatatatcatttcttcgagagagataaatgctttctgcactgggcacttcttcagggcttccttctcttgtgaaggccccatgtacacgtcaaaatgtagtcaagcttgtccactttctcctattcatctgccctatgtcagctgaattcagaactcagccagagactaagacgtgaaggagaatttttttttccttcccaacactttattcctagaacccatagtagctgctgccacatagtaggtgtacagcaaaggcctgtttgggtgaaataataaatgaatgaatgggtggtgaatgaatgaagacacaagacgcggagccctgggagcggtgactttgccataaggttccctgagtgtcccaaggccagcgctgcccatcagcccatgcctccctctccaggctgtttccttccatccatttccccaacactcatccatgagctcctgtaagtacccggtgccatgttcaggcaccctgagaacatagcggtgcaaaaatgccacatattcctgtcctcctggagtggatatttcgagacaggagacagatattgaagaagtgaatgattaagtataaactataatgtcagattgggataagtcttaggaagaaaaaacgtgctggagggaggaacagggagtcacgggcaatgcgtgagcaaaggaggtctgagaggaccgctgtggaaggaggcctgagatctggaggaggtgggggagcccggcagacataggagtgggattgggggggaacagggggcttcagcacaaggaacagcaaggccaagcctgggtacgtgcagcctggagagtctggggggctgcaagggacccctgtggggtgggaggtggactgaggaggagctggtgccccaagcccaggcgaggttttggctttcgtgctgagcaagctgggggccgggatgtcccagcacaggagggacaggacctgagcaaggttttaagtcccccggggccatgtgtggagacccactgtgggagtgaaggggaaggcagggaaccctgggagaaggccactcagtgggccgggtatggtggagctggaccagggtggaggccagggagatgggacacggggccagagcaggaagaaagggtggcagcaggaaaaaagcatgagcacgcagggtctatgcgttggttgaatttttccttagaagactcaacctcagcataccccttatttgtcagatgtgggtcaccacctgccaatcacagtctcacgggcaggtcccgtgagccccctggagctgctgccctgggctgggcatgtggcctcagacctgggggtctggcagcaggagggggcacaggcagtggggagtgaccccaccccatgtggccacagcctcagcaggttactgcatctgggtctgtggtccttaaagtggggacagtgccctggcgagtcgttgggaagatgaagtgggcgctgtgagcagacagctgggtgtagggtgggcacagagtcaccatcagcagaaggctgctgggggaccaaggtagtgctctgccccgccctgggaggatgggctcctggagccaaggatcaccgagccttgcaggaagcccagacagctcaaggcccccatcgaccaatggctgatcaatactttgtcagctgaggcttcccggcaagggagtggctcccagcactgggcttttaggactagggctatgattggcagggacactggggacctggcttcctggatgtcctggctggtgggtggacacaggcctcctcaagtggctctgacaagcgtctcatcaattcaagcacagcaggtgggtgccaaaatctgcaggcaaatgagggcaggaccactgagcacagccacaggggacatgcccagggcaggtatttacacagtgagcacccactgggcattgctggtgtctgtcctgacttactgagtgttgggtgtgttgaacatgcctggcccttgcacacgcctgtgggctgcatttgagtctgggacatccagttgtgacccctgtggtaggccctccataaatacctgtggatttggtggggaggccagtcttggtgcaccatgggccctcacagctgctgcaggggtggatttcccagggccaccaagtatttcccttcccttgtctcctcctctgtgtcactccgcccctcctcctccctccttctctgatcaggcacaactgacacttgagcccctggaggtctggggattacggagtctcggcagacacatgttgggggctgaggaattacccagcagctgttgggcctcaggctgcagaggggatttactccagctcccagccccagggaaggatgaagccttctgacccccaacctggcagaggctacgcagagacagtacgtccactcctgggtgcaggggaagcagggaggtaacggaccccgtctccaccctgagggacatcccaggcccgcaactgtgagcattagtcagactgtggactgagtctggtcctcacactcaggtgagcgggaaactcatcacccccgtacttctctcccaattgaatgtctcattccctcattcccagcccccattccgggggagtgaggagggggcaacttcaacccacaccggggtacctcttcggggccatgtgatagttctgggatttggcaggtgactaaatgtgaagggagccaggacctccggggcctgtctcagcaggccctgagcctcacagcacaccagcgactcccctcttcctcacacacgccccttccctccagcagtaaaccatgccagcctgctgccatggtctgtttaggctgctatcacaaaataccataaatgggtgccttttaaacaacaggaatttctttttcacggttctggagaacatggagtccgtgatcaaggtgcctgcagattcagtactggagagggcttattctctggttcagaaaatgctgcctgcttgccatgtcctctcggatggtggaagggctgagccagctctctgggggctatttgatatgggtactcattccattcatgaatcctaatcacctccaaagctcccacttcctaataccttgggggttacgacttcaatatttgaatttggaagagacacaaaagttcagaccatagcatctgtcttctagtagaaccagaattcgcatacttctcgcctccttcattgctaccacacatccaagcctccttacctccctcctgaatactgcattggacccgtctctggtcttctgcagttcctcctccatattcagccagaagggccctgtgaaaacctgagacagctcctgttcctcctcctcacagcacttcttccctccaaagacagtccgtgcagttgtctacaaggccctgcctgatgcgaccctggttatgttttgcctcatttcccttacttccctctttctcaccttcttccagccacagcagcctcattgctgttcctcaaacacacctggcatcatctaacctcagggtctttgcacatgctgcttcctctacctgaaatgccctttctccagatgactagcccacatggctttctccctcaacaaatccagatcttttctcaaatgtcaccttatcagtgagcccttcccaattactcaatatataatttagacccacacaatcacacacatgcatgtgtgtcatgcacacacacacacacacacacacacacatcttattcctctcacctgcattctttttctcctttgtagttaccaccactcaacatgttatttatttacttaattactctgtttactgctggctccactgatagaatatcagccgcatgaggtcaacagctgtttgttcacagctgggtctgttgcacctggcattcaatacttttctgttgactggatggtggatggatggatggacggatggatggatgagtggatggatggatggatggatggatggatgggtgaatggatggatggatggatggatagatggatggatgatgagtggatggatggatgggtgaatgggtgggaaggtggatggatgaatggatggatggatgggtgaatgggtgggaaggtgggtggatgggtgggtgttggatggatagatcaatggtcgtgcattgctcctgtcaagctgatctggaggcccctgctccttctggggccggtatcaaacacagaaaccttagggagactgatctgggtcccctgtgtctaatgccccaggaaggtggccagagtccctgatgggtgtggtgtgtggctttgagtacagcaagggcctgggtggagttcaaggaggcaccaaggcccaggcagggaataactgcacctcgagtctaggtcaagctcagtcttgcaggcattttatgtttggcccacatggtgcttttaaaacggacttttagcaatacttaaaaatcaggagacttcatagaataacccctggtttcttgcaaaagcaaagaattaagtttcaaagggccttgcttccttcacataacaattagccagacctggggagtggccgtccctttacatggtaccttcctgccagttcactgccacccccaacgggcccgttcacccattatgtcctcgcctcgccccttcagacatgtgcgttcgcagcccctgcctggttggctgttggatccaagagaatggcagagagtgcccaccccacaaggtgcaggagctgtggggtattttcatgtgcccccaagtggcccagaagtagcagagagaacagctgggctaggagggctgtgggaccagcacaaggagcgtgtccaggatgcccacgatccaggctgcaagacgagtgtctcagcaagtgctgactcagagggatgtgacccaatgaccatgttagttctcactgtcacctggtaccaggtaaaccctccaaaaagggaaagggccaccctaaattgtctgaggtcaaacttccactacccatgcaacacagggactcaaacagaaataatagtgaacatggcaggcatagctatgtctaagtccttttatgagaaaatgtttttaaatgtcccagccacatgaagaaaacattctgttactgtcccatttcatagatgaggaaacacacgttcaagcccagcgtgttcaagtatacttggctaaggtcacagggctgggaggaagcaggtgcaaaccaggcattctggatccagaatctgtgcttcaaccagtttgcactaatgccaccaagatattgtgaagttttgcaacaaaaggtgcatttctgccacttcactggtggattgaggtgtggcttcacctcctctctaaacaggacccgtaaacaccaactgctttctggacctcttcaggctgaggctgccctgttgtacagacagtgaattggagggcatgtgcccatgtaaacagctgggctgtttggtgtgggggtgggcgggggcactgcagcctgacctttgctccagcctcttccttccttggggaagtggttaattggttcgccaggccagagggtcactcctagaagcccctgggacacgatcgatttctactcagaaagcctcagcctggaccagctgtcacttgtcagtgtcactggggagtcacgtgggctggagaagaaagtgccctgagctccatcctcagccacatgggctcaaactcccagtacagagactcccagcccagcctgccctcaaatagaaatgcttgttaacaggtcctgcactgctcagaaaagagtcataaaatactgtaacctagccagacaagttattttataaaggtcagtaaatgcccaaacatgctaaacagtgaaatgacagcaattcgaatcaaatgttatttattatatgataaaatgttttctatatgtacatctgtgagcatgaccacgctgaaatgaagccgtggggtgttcacacctaagcacaagaggacagtgaacatgggggtgcaaaggcagactgacacgcttggtgccgtaacctcacaacacaagaacacgacggtgggtgtgccgcaaggtggacaatcttccctcaatgtcaaaggttgatgccgtccttaaaaattcagcacatcttggctgggtgtggtggctcacacctgtaatcctggcactttgggaggccgaggtaggtggatcacctgaggtcaggagttcgagacagcctgaccaacatggcaaaaccccacctctgctaaaagtacgaaaattagccaggcgtggtggcgcatgcttgtaatcccagtacttgggaggcagaggtaggagaatcgaacccaggaggtggaggttgcagtgagtagagatcgcgccattgcactctagcctgggtgacaagagtgaaactccatctcaaaaaaaaaaaaaaaaaaaaaaaaattcagtgcatcttaaaatcacacggagaggataaaaagaaaaccctttgtggtgacacaacaatgtccaccatgtccctcctcctttcgaggacacgggttgattctgggcatgtcctctctcccctgcagctgtggctggaagtccagggcactgacgcccccagagtacggccctcactgcacgtggagggaggcgggtgtgcaatgcgccagcagccttgtggctcacggggacactgccgggcgcaggtcctggactgtttccccagtccccagcagtctgagctcccaatgcctgcagaggtgacgtgttgacacacccagtatctatggggatgccttcccttcccacacccactccagggttcctgggtcatgtcccaaatagacgacttgcccttgaatctgactcagggtctgcttctggggaggccaaactgagaccccaactgagcgagaatctaggtgtagagcctcaggaacgggtttcacctcctcgaatgtctggcaggacatgaaagcccggctggacccgacactggccctggttgcgaaggactttcccatgcaccaagggcacaatgtcagcaccccggccccgcccactgcttgtcagtgatgaccaagtatgttcccacaattcttagaacttgcccggggtcaggaccacccatcctgagaattcccacagctgatccctccagacaaggactgtgggatccacaacccggacagccgcctgggagctctggtctgtgtggaacagaggctgactgcccctgtcccttcccgtttccatctgtgcggccacctgtcctccctatttcaggcaggaggggaaactcctttgtctcccacctttgccctcactgtgatgcctcgggtgccttccttggagggtgcagtgcaccgttcagaggtcatgagcgctggcatgggcggaaccactcccagatgggttttatttcattcacggaaatggcccccaagtgtactgaaaagtggaatctgtagtcaaaatgtttaaataaggagactttacatttaaagaactgcatttccaatttctcttgagtaatcacaagttgtgggaacacaggtgacatttgcccttggtagggaatccctgagctgagctgcagctgcccctccacacagggcctgtgctccccactttgccacaatccccactcctccctgttgtccccactcctggcctgtttcactcactcacaccccctgccttgctcctgtgagtttgtgtccctgccagactggggactccacactgaggctgaggtcaccccactctctcccaacgttgcagagctgttacaaggacaaatgagatcatgagtataaagtgcctggaacgtagatgagcaatacaggtcagacaatcttaggattatggttactgtttataaagttatagagacggcacagtgtagggtcaggagggtaggctctgcagtatggctgcctggactcaaatccccactttgccatttcatctctgagtgaccttgggcaagttactaacctctctgccactcggttacctcatcagtaacctggatgatcaaaattgcaccaacttcctggggctgtgggggctgagtgagctcaggcacctcgagcgcccagaccccagctgcccacagtgaacgcatcgacaagcagcagctgcatgtgtgttagcactattgttcttcagcactccctacctcacctaagcccccacgaacttcggatgccacttcaggtcttcctcttccaagaggccctccctgaccatcacaggctatgagcacctcaggtaaacatgcttctgatcagcgcccagatctccccaagtcagcatgtcaggtgtgcgcctccacaacccataacaatcacaatggtgatgatggtgatggtggtgatgatgatgatgatgacgatgaatggttattgagtcctgaaaacaggccaggagttgcatttcactctctgagccacctcatttaactgaccaagggtgatgaggactcaggtgtcattcctgcacccaccaggcctcctgacaggagggaaggattaggacacacattccaagcacctgctgtgtaccaggcacatttatacaggttgactcccttaattctgtgggatctgcattaccattacccccattccacagaccagaaaactgaggctgggagcgtgaggtgaccggcctggggtcacacagccagtgagagacagagggtatcaggcactcaggtgtgtttggtgccaaataccaggctctgcccgtatctccatggggcgtttcctccaggtgtgagtgggaagaagattccacaaggctgctgccctgggtgggctgttggcacagagaacagggcaacagttggaggcagacgtctggggtcccttccctgcactctcataagctcccctggacacactccacatcaggatcctgggtcccctcggaggatgtctgctcacctccgggaggggaaaggagctgatgagaatggagggcccctccctgcagtgcccggaccccagccccagctcctcaaatcacagatggtggcactccagcaccttgaggatgcaagtaggaagggcatggggctctcgtttctctcctttcctctcatctctctctcctctccagtcctctcctcacctccactgctcagccctaggcccctgagtgttggaattaatgctgacctgtgccatgccaggtgtttccttgaattattccttggccttttggttgcaagaacccaaatcaaggactagaacaaaactaagaacaaagaaacaaaatgtctggtttgctgttccacattcacaagatggcttcaggcacagctgcatccaggggctcttacagtgtcacaagggtgcctcctcttggtctctcagccctgcttccctctgtgtcggtggagttctcagactggcccttcaggtagtggcaagggggtccccagcagccaggcttccatcctccaacttagcaccctcagcagaaactgggctctttcccagtgagtctggcacagccctggggtgacactcattggctcagatagagttatggatcttactggccagagccaggtcacatgacatccctgtgcagagaaggggcttgaaccacttggactgagagtgggaggagtttgcactgcgaccctgtggtgggtgtcagggtgcaggctgcggtatctgtggccacaacatcagtgttgggtccccagggatcagtcctgccagagatgctttcttgctgcctgcatagcctcctcatctgcttctttgtcctcccagaggttcaagagcccctggtgaccctgtaatccattcctttctctgctcaaaccagccagagtggagcctctggttgcaagaggagcgctgatactctcatggtaaagcctcattttacagatggggaggctgcgccccagggaggggaagtgactcccagtgtcacaggtcccatgagtggtggagacaggatttgaactggggacaccggacagctgcgcctgctccactccaggctgacgtggtctcctttctgcagggccagggccaggccctcagcaaggctgctggggagtcttggggacagagctgctgccctggctggggtggccttgcaggaggggcggggcctgctgtccttcctgggtaggctgagtcttgctctgtcctggccagttttaatagcctgagggcagaggggaggcaaaggtgaactctaatgagccattgatttctcaacaggaagccggctgtggccccagcgcatttcctcctaatggatgggaaagaaaatgtgaggacagcggtgccctggcgcggggccaccctcgggcacctcgctcattcccgctgtctgcaccttctgaggcccgaggtggacttttcgggaggcggcccagggtgagagagtctgtttgtcccattccagctctcacccccagcgtccagcagggtctggatcccgccatttgctcagacgttcaggctgcttctgtccagggacgggaccgtcactctgctgttcaaggcagacctgagagccacctggagtccctcagtgtggcttttccactctgacccaaggcaggccgcctctgcacacctgccctgtccacacttaggcagagcccccgtcacttctccctgggtcaccgcagatgcctctacccggggcctctgcagtttactgtccccatggcattgagaacactttaaacctgcaagtcgggccataatctctctgcctgctgcccccacggctccccacctgactcagaatgagtgccagcgccccggccttggccctagcctgtgccacatgactgccctttgtcctctgggtcctcccccaacctccccctgctctgtgacctgcagactgaccaggtggcccacaccacagggctcccttgcctctggctctggatgtgtccccccagtggggagtcccattgggaggtcagcaggggtggtgttggagttcacctggttccttttttggggggttgcctggggctggctgtgccctggcctcctttctatcctccactacaggaccgtctttcctgccccagggcctttgcactggctactcccattgcccggactgctccttaacccactcctccggcactcagtacacagtgcagccaagggctgcgtgaggaagtctgggggagggaggggcaggttgtgcaagagaaacaggagcttccctcaggccacatggacctggggcagaatggatctcagtggagatgtcaagctggtggctgtcactcagaacccagagcttcgaggaggggactgagctggaggcagatgtcaagggggtgtcttggttgatgtgtgtcctgcagtgtcaccttgtcagggacacctcttcacccctcccatctacagtgtgtgctcctgcttcccccatggatccctaaagcagcacattatattttcatcacacaatcctcatcatgcaatgatcattcttggtgattagtgttcagcactgcctttcgtcttccattttaactactgaatctcaagggtcgaacacaatcccagcctcataataaatgttcagtagtgtttggctaaataaaataatcagtgaatacacagtgtgcatttaacacacacatacattcatagccctgtcccacctgtacacactcacgcacctgtgtgcatgaacacgcccaccctaggatcctttcctgatggtgggattcttgtgtccaatgacgtgatacagctccctgggaggagcttcaaatggtgcccaccacagagccagtgcccatcttcactgccccgtggacacctgtgaattcgaaccagacatttacctagactctctctcccagcaggagcatcgccagacctctgtggatttgtgctttatccttgtttctctgctccgggtgtctggggaggatttatggaggaaacaacataatgagacctgagtgacttagagcttggggaggtcgaccacagcatcttcagagggaaggaaattcagatggcaatcgtcccagtggatgacttcacgtggtttccctggggaagccccgcccccagctgctccttcccgaggccctacctgcccttccaggcccagcccagtcctgcctctcccaggagtctcctctgagctcctgggtcacagggaagggtctcctcacagctcctgaggcagctctgcccgcccacccactggggttcatttctggccagagctcctccctcctccccagggcctcctgtggggtcctcagagagctgcttgtcccccaaagctgtccttggtgtcttcttagctgaggacggagtgttaaacacatcacagacaggaccatagtatcccacactacgccataaaaggagagttacaactttcaacctctgtaaatatttaaaagtaatgaaattatactccaagtcttataagacattaattgtatcaagggtctcttgtataaaaatatgcatgtatacattaacactataagtctctagaaccacagatatgacacaaaattaacataggtgctagaataaatattacaaggtttattcacactggcttagcttctctttctagagcttaggaggctgtttggggataatttatctatttcgactgtgccaaaagctggtgcaaagcctgggctttggggctgtgggtgtgcacacagctggggtcaaggggaggtttgatcttcagagctgagcaaccttgggaggaacacgagcccctctgctgtccgggtttcctcatctgtaaaatggaatcatcccaggattgtctggggctgcggtgaaatcacacatgtgaatcatgtgaacagtggactcaggaccgagtgacttctcattaaatcagaagctttcatcgtcactcgtttacacaaatacccccttcccccaaaagcatccccaaagccccaggctctgccaaactcccaggcaagggtggcttggtagatcgtcataaacagctaacatcataaaaatatgctcctagacacgttttttaaaagtgtgtattgaggccgggcacggtggctcacgcctataatcccagcactttgggaggccgaggcgggtggatcacgaggtcaggagatcgagaccatcctggctaacacggtgaaaccccgtctctactaaaaatacaaaaaaattagccgggcgtgatggtgggcgcctgtagtcccagctactcgggaggctgaggcaagagaatggcgtgaacccgggaggcggagcttgcagtgagccgagatagcgccactgcactccaacctgggcgaaagagcgactccgtctcaaaaaaaaaaaaaaaaaaaaaaaaaaaaaagtgtgtattgattacacaataggctccaatataatacaaagttacatagagcagattaaaaatacaactctctctgggccataaatttgacttaaaacttgcacataagctggaaaagacactaaacatttcattaatgcttatctgctgggcctcagaatttagctctgtggatgtgttgctttctgctgcgtgatccggttccctgtagacacgtctgtggcacccccgccccactttgatctgtgtttcgaaatttataatttacctcccacctcctgatgtggcgctttccgtctgctcaggactccagtgaggtcatccattcagtacgtattcattgagctcccactctgtgccaagcaagattccaggcatcggggcgtgaaacgctagaaaaaagacacagatgaaatatagtctaatcaggtgagataaagacaggaggcaggaggaaacgatgggaggagggagtgagggaggaaggacaagcgaatgccagtgaattgccggtttgctcatgcactgtcattagacctcacagcaaccctaccgtcagtgcaagtgccgttatgtgcgctattttacagatatggagactgaggcccagagaggttaaagtaactgcccagagacacccaagtaggaagtggtgggggcatgaattgaacccaggtccacctgaattcaaagcctctcacgggtctggaatgaaggaaggacggaatgaatgagtgaacgaatgaatgaattctggagtgaacgcatgagcaaatacatatcactgtcaagtccctgcacatcaggattccatgataactcttcaaacccaaggaagggtccaagcctctctctacctctccctctcccctactttctcattcccaagaattatttaggatccagatcaagaaacctggccctcttctgctcctctccccgctgcagatggcattttgcctggcctgctggggcagcccccaaaccgctctgcctgattccgccttcactttccccaggccattcttcacttactaacagaggactccttgaagacctgaggccgaccgtgccctcccctgctcagagcactccaggactcccacctcactcagaacaaaagccaaagtccttacagaggaccccaaggcccagtgagatttgcccaccactttctacaaccccagctccttccccttgccccctcgccctctcagccactgtggcctcctcgcccttcctctgccacaccagacactggctcgcccactgtgcagtcctggccttgttctttcctctgcctggaagttccttccccaggcatcctgctgtcagctcccccagttcttggcttaagtgtctcctcctctgtgaagctcaccctgactacctcatttctaatggcagcctcacccccacattttgtactttatttttctcttagcacttgtgaccatctgacatctgcttatgtatctcaatggctgtctgtctcttcctcaaatacaatgtcagctcaagagggcagggatttttattttccagtcctccctgtattctcccttcctagaatccctttcatatcagttaaaacaaaaatcaaacacctgccaggtgtggtggctcacgcctgtaattccagcacttcgagaggccgaggcgggcggatcacctgaggtcaggagttcgagaccagcctggccaacatggtgaaaccccgtctctactaaaaatacaaaaattagctgggagtggtggcacgtgcctgaatcccagctacctgggaggctgaggcaggagaattgcttgaacccaggaggcggaggttgcagtgggctgagatcgtgccattgtactcccgcctgggtgacaacagtgaaactctgtctcaaaaaaaaaaaaaaaaatcaaacaccaacagcaaaaacctttcctcagcatgttcttggtgcccacctaagggcctgcctctgtccaacatacactcatgggcatggtgtgtcaacgaggcccaggcttgctgaggacccaacgctaatggcatttgctaacggctccaggcctcacgtctctatgtttcacctaatttctgtgagcatcgtttctctacatgatcgacccacgcctcattctgtaagcccctcattgggataaactgggtcctcagaacctggaagttcattcaggcaatggaggtcttctgcatctcatctgtctgcagagttcccaggaccgggctgggaagacaggggttattgtgtgtcctgctcactctggacactgagcacacggagctggggctggtctaccgtgggtgctggctacatatttaggtttgaaagggtctaaaagagataaacagcagctgaggacaggtaccaggattgggtgcaggggagctgttggagctgagacatgaaggatgagacacagccaccagaagaagatgtgggaaacagcgagtgcctaggtctcggggcaggagtgagcaaggggagctggaagaacagcaaggaggcccctgtggttgagggagccaggggagagtctgagaggctgccaggggccaggttatgcaagatattggaagccatgaaagggagcttggattttcttccaagggcaatagggagccattgagaatttccgagcaggaggatcacatgatttgatttacatttttaaacgctcatttcagctgccgggatgagcatggatggagggaagcctgattggacagcagagaccacggatgaagctgctgtgactatccaggaggccaagatggatgaggggctctgtccagtgaggcatctggggggctcaggcacactttggagataggctcggcattcctgcttggctggatggactctacgttaaggcttaggaacagagcccctgctgacactgaggtatagccatgtctggtaattctcttgttcctgggacatattcactgagcgacctcacaggaaggagaggtggttggacctgtgccctctccaaaatgccaccacgacacagtcctaatggcccctaaactccagacttcccagatgcatccaatggggtatttgcccctgggccttcccgtggggtctcccttctccttctctgaggaagcttccacctggagtttgcagagggccataaagctcatgtttattctgctgatttatataaatgactttcctttcacaagcacgcccatcagcactgagcatgtccacattaattgggctggaggaggaaaattaagtgcttcaatttgccatttttcaagatgaaaaatgggaaaggagaaaatcactcaagtgagagggaaggagctgtgagtgttgaaacccacttcgaggagaggcagaggctgcgctgaggggaacagactcctgtagggagcagccctggacgaaggaaggaggtgatgaggtcagagcccacagcagccccagcagcccttcatggacctcaagtgtttaaacatagtaaagcacatttgctcctggctgtcctgtagggtagcatttcctgaaccctgagtcagatggggtcctaaagttgcaaggacagaaaatccaaccccaacagacttaagcaaaaagggaatagatagctttgggaggccgaggagggtggatcacttgaggttaggagttcaagaccagcttggtcaatgtggcaaaaccctgtctctaccaaaaatacaaaaattagcttggcatggtggtgtgcagctgtaatcccagctactcgggaggccaaggcaggagaatcgcttgaacctaggggtgggggctgcaatgagccaagatcatgtcattgcactccagcctgggttacagagtgagactccatctcaaaaaaaaaaaaaaaaaaaaaaaaaggaaaaggaataatggactcaaagaactgaaaagctttgagggttagtccagtgtcaggtagagcttgatctagggacccagacactttctcccacccctccagggctgctgtctcctcttcctttgcttgtggagagattccacctaccagctcagcagccccagggaaagaccttctcttcctggcggcccctgaggacttcgcaggattcacctgattggacgcgacttgccatgtgtccatctctgatctaaacactggggtcaaggtggcaggatttgctcacagccagggccactccctcaggtgacttggtacgagtaagaaagggatgccccttcctttcaggagaagcagcctgtgccaggacataagtctgtacctggtgattctgaatatgccagttcacagacctggatcttgtcccttgcatggagctgggtgtggggcccacccacctacagcacatgaaccaagagtggaggatggaggtttcccaaaggacaatcaaggtgctgtgcccaggaggcagagctcattcattcattgcctgtttagaaaatgcttactatgtgcagtgaagaaagagcttagagcctcgtttggggattgtcttcatctgttttctgctgttattacagaatactacagattgggtgatttaatagaaaagaggccaggcacagtagctcatacctgtagttccagcatgttgtggagcggacacaggtggatcacttgagctcagaactttgagaccaacctgggcaacatggaaaaaccctttctctacaaaaaaaaaaaaaaaaaaaaaaaaattagctgggtgtggtggcatgtgcctgtagtccgagctactcggaaggctgagatgggaggattgcctgagcctaggaggttgaggctgcagtgagccgagatcatgccactgcactccagcctgggcaacagagcaagaccctgtctcaagaagaaaaaaaagaaaaaagaaaagagatgtatttggctcacagatcaccactctggaggctgggaagtccaagactgaggggctgcctctggtgaggggcctacctgctgcatcagaacatggtggaaggcatcatacggtgaggaagcacacgcatgagacagagagaaaaaggggctggactctggcagtaactcagcctttctgtgataacagcatcaatccatttgtgagggcaaatccctcatgacctagtcacttcttaagggtctcacctcttaatactatcagaataacaattaaatttcttttttttttttttttttgagacaaggtctcactctgttgcccaggctggagtgcagtggcacaatctctactcactgtaactttgacctcctaggctcaagcaatcctcccacctcagggtcccaagtatcagggacccacaggtgtgtgccatcatgctcggccaattttttaactttttaaaagagacagggtctcactatattgcctaggttggtctggaactcctgggctcccacctggagctcctcccaccttggcctcccaaagtgctggaatcacaggcatgagccactgcacccagctggcaattaaatttcaacatgagttttgacagggatatccaaaacacagcaggggtatagacaaaaataatcaatgaacttattagttatataatattcacgacagcagtgttgtggagaaacgtaaagcaggacgggaggacagggcatgcagtgtcagatggggtggcctgggaggcctcacagacaaggtgacatttgagcaaaacttgaaggagataagtcctgtggatgtttcagaaaatagaaatcccagaagaaaagcaggtgcaaaggtcctggggccgaagatgagttggcccaagccagtgtgacggggcagatcctgcaggcccttgtgggccattagaaggaatttgacttctgctttatctgccatgaaaagcccctgggggttctgagaagaaaagagacatgatccgtgttctaatcgaattgctcagattgctgtatgagattagtttgtcatggggagggtggaagcaggaggtcagtgaggaggggactgcaattgtccaggagacaggggacatggctctggacttgggtggtggcaatggtaatgagaagcagttggatcctggatttaatcaggaagcagaccataaagggtttgtatcccgggtaggcaaaggtagcaaatggcccctacaagtggtgaactaactagatactgatcaaaagcaggcaatctctctgtttaaaggtgacccatttcctgtatactcgtctcctccctcatgtccctcaggtgtcatcagggagttccgtgctccttgtctagagccacctgactgtggatagctcagccaattgggtgggacctgtgtgatccatggaaagagatggatgttgtgagctgggtgctgaggctcctcgtggtaccctgaacccagagccatgctggaggcagggaagtggcacagctccgctcctcctggacaagatgcttagcagtccctggtccccagatgcagaggacagagccttcataaagcagccttctcttctgtggatcagcctggtcccaccttttaggtgacccaagggaaaactctgagctctgttaggattcttgcaaaaactcaattcaaacagacttaagtgaaacaagaaaacctcccagcccatgtaatgaagtcaggcgtattgggcttctgacccagctggctccagggctccaacaatctggccacgacgcagtctgtctccacttctgggctccgctgtcctctgtgttggcttcactcccaagtaggtagtctccacaggggaccatgacgaccgccggcagctcttggcttccatcccccagctcagcagtcccggagcacagagaacgtctctttcccagagtcagcaaagccccagggcatgctcccattggcccattgtggtcacatgtctgtgacaggccacagaacggcccccacgaaaggtgtccacgtcaaatacctggaacctgcggtgcccacgtagggcaaagatgtggctaagctaaggatcttgagacgaggacatgattctggattatttcgagtggaccctaaatactgtcatgggtccttattagagggaagaggagaagacagaggaggaggcaatgtggccacagtagcagagactggagcattgtggccacaagccaaggaatgcccgcagccacctgaagctggaaaaggcaaagaacagagaggcaaagtggggcaaagtccccaccccctgagcctccagagagagccgtggccaccctgacttcaggtttcccaccttagggctgtgagatgtgaatttctttgttgtgggctgcaccgtttgtggtaatttgtcatagtggccacaggaaacaatgtccctcccacttccaatcagagtccagtaggatggagcgttctgtatggtctccctggggtcacacatccccccagcccagtgctgggtcagccccacccggtccacaccacggctcagcatgaggctgaccaagtccataagggaaggtcaaaggtgggcgggaaggacacatccagacagaaatcatggatgctgccgtggctccttctcccagagcaggaaactgaatctgagaggtgggagatacttcaccagggtcatggagctcaaactggccaggaaaagctttcagcccagggcttcacgcccagctccagggcagggcatatccaatcttccatctgtaacaccctgagaagttcccaggaggcactgagtcatgggtgaggcctgtctcggggccataccccttgtctcaataagatcagcctcatatgtattccccaaaagcaatctgtgtaataaggagcagcccaggaggcccttctctccacacccctcattctccaagggcggctgacacccattagtgctccatcccccagtttggaaaacacaaatgtgcagcgtggaatgcaactcactgagcaggctgccctcctcctccccgactagactgagaggactgcagtggcatggggggtggtgctgggggaggaggaagtgggggagagtgggagggaccctgccaggagggctcagcttccctctgttctctgccagggccccgaggttcccctctatcatgctggggtgcaaattcacacatccccaccaatgtgcctgtgtgcatgcccaagcacacagccacagggacactggtagacatacacatgtgagcacaaacccacatgtgtgtgcaaagcctgtctacaacacatgcctgtacctgcacacacgtacactccaccacatacgtacacacgcagagcctttcccgccatctcacccacaggcgcacaccccctgaaacagctgaatgcaaatgccccactctctacacagaccccacagacacaggccacatcactcattccgagaccagacagcctgggtccaacccccagcttcaccacttctgaacctgtgatttgggtcacgtggtttaacccttgtgagcctcagtttcctccaacctaagaaataatctcagataaagccgtcatgggggttgcgtgagttaatgcacggaaagtgcttagaagaatggctggcaagcaacaggcatgagacaaatatgagccccaagcacacagccccagtgcatgtccacacgcttccacatatgcacacgtgggcacccacatgcatgcacctgcgtggatacctggcccaggcaccacacacggagatgaacattcacatgtgtacgaataggttaggcccccaaacagtgtactgtgcctgtgcatagtactcgtgcatcagcatccccacccacccacccacagatctgtgcccgtacgtatatgtccccacctgcacacacacccctcctgttctcagacatggccaactccttcatcccctccctcttggcccaatcacagtgtctttcagatctgggccttatcagaagccccagtcagaggaaggtggctactcctggctgagctcatgaaggacaggctcccctcatccagtcccaacaccatcactctgaggaactttctcggatgctctttgtggactcagagactcatggaacatttgtgctggaagggcccttacctgatcaggtctcgagttgtaaagatggggagactgtgccccagggaggggcacccccttgtccatggtcacccagggtgcaagtgcccagaacccacctggcagccactgggctgggtctccagaaggtgtcaagtgaaacttaacgggttgatgattggagtgactgggagacggtgctgtcccatcaatgcccccatgatgcggggaggaaattgaggctctgagaggctctcactcacccacccaggactcaaacccagctgcactactttctatttcaagaaagcatggcagggcctcccctgtccctgcaggctgtctggacatcggcaagagataggtggctgaggcagtgtgggtggtggggtgagaagccagggccatccccaggcctgggcattatgctggggacatcaccacacctgcagggccagaagtgagagcagcagtcggcctcaaatccaggtctgagagctggaatgagaccaaattacgcctgagcagggcttccccagggcaggaaggtggtggtgctggggtcaacggcaggccctgggggctcagatattttagctgagagtatgtgtgtactggtgtgcaaatgtgtgcgtgtggagggtataatgggctggtggggtcctgggttgtgttcgaaatgtctgtatgtgagtagggtacagatattgtatgaccaaccacagtgtgtgcacagggattgaatgaggcttctaatgttgacatgctttattttcctgtcgcataccattccctgcggcatttacttttccagacctgcacaatctccaaggctggtgaaatgccaccaactagatattcaccaaggcctgcctgatgccaggctcttggggaaagagaattaattctccttcactgttcactgtctgggtcaactcctcatggccaactgcacaagaaagaacaagggtctacagtctcctgccctgtttcctgcctccatctcctgcttaagcaccttctcaccccaagaatagatagccacaaggcatgaagctcaacagctccaaagagatttgagcaagcaggactgaagactccctatttcacatacatttcaataataatgataattaaatagctaccatttattgaggccgggcacagtggctcatgcctgtaatcccagcactttgggaggccaaggtgggtggatcactggaggtcaggagttcaagaccagcctggccaacatggtgaaaccctgtctctactaaaaatacaaaaattagcctggcatggtggcatgtgcctgtagtcccagctacttaggaggctgagtcaggagcatcgcttgaaccctggaggcagaagttgcagtgagctgaaatcgtgccactgcactccagcctgggtgacagagtgagattccatctcaaaaaagaaaagaaaagaaaagaaaagctaccattgattgagcgattaccacactctgggcactgttgcaactgccttagcatacctgacatcactcaacttctttgaagctccattcacctgtcattgttcccacccaccacttacagatgaggaaactgagacacaagggggtgagtgactggcccacgttgtgagaggtagaggcagggtttaaatttacacagaccgactccaggttaaaattatcttcaaattcttacgcaagagcccatgtttaagaacagccaaggagaccaggtgcggtggctcacgcctgtaatcccagcactttgggaggtggaggtgggcagatcacctgaggtcaggagttcgagaccagcttggccaacatgtcgaaaccccgtctctactaaaaatacaaaaattagtgaggtgtggtggcatacgcctgtaatcccagctactcaggaggctgaggcgggagaatcgcttgaacccaggaggcagaggttacagtgggccgagttgccaagcactccagcacgggcaacaaaagcagaaactccatctcaaaaaaaaaaaaagaacagccaaaaaaaaaacaagatggaatcaactaggggcgggaccactggtcttaagtgatttcagagccactgtaagcaaatccatacggtcctgatgttggaacaatcaaacagaaccaagcatagcaaaatataactccagaataaagtcccaggaaagatgaaacattaatattcttgccagacagtgggctatacgggggtgatgaagcagggtcctctcccttgaggggtgcccggtccaggcagacaagcctgtcaacggatcatctcaatatgggtgctatgtgctaatcgggtggtctgtggagtgttaaagcctggatgttaaaaactgcatcctccctgaggtcagggaccatggctgtatccttcaagtctagccatgggccatgcccacctggcactgaggacacatcggtggaagcacagcctggcgcagaaggagtcagtgtagaagacagactcctggattagtttctaactggaggacatggggaaagttattccacttctctgtgtctgttacttcatttttaagataaaaaatgctggtaaatagaatctgcctcaaatagctattagggtgtttaatgacataataaattgattattcctgctagagtagtaagaacaactccataaaaaccagtcattattataattgttgttgtttctaacattatcataaattaatgatcaggatatgactgccccagaataataacattgacttcttctggagcactggggactgggggccccatcctgagacaccatgatgcttttcccagcctgcttggcagacttcaacctattttgcagacaggagaatggaagtgaagtggctcgcgacccacagaggcagaggtggaaatgcaggaggtgaggaatgactttaacgcaacatcctgggagagacaggaagaaaaacacagaaaaagctcacagcgtggcctcctgcaggggcctccagcccagccatattggtggcacataagacttccaggggggcctgaatttgcacccttcaccctcgtttttctagagaagcagggaatgttgtcttggggatgaggaccagtcctttaagcagcttaaatccccatccctcacctgatgggcccacagggacaccacagtgtctactatgatctgttacctgcacaaggtcgtagtcttttcaggaagatgaatcaaatgacaggatttgcagtgagcagctctgtgtccaccagtggccaccacttctgcaccccaaggccaggtcaggtctcttcttcccagacctttctggaaaatgggctgcctggtctagagtgatgctccccatccccaccccaccatgtctgagatcccagctgtatcggtgtgttctcacgctgctaataaagacacacccgagactgggtaatttataaaggaaagaggtttaatggactcacagtttcacatggctggggaggcctgacaatcatggcggaaggcaaatgaggaacaaagtcacatcttacatggcagcaggcaagagggcatgtgcaggggaactcccctttacaaaaccatcagatctcgtgagacgtattcactgtcactaaaacagcatggaaaagacacatccccatgattcagttacctcccactgggtccctcccatgacatgtgagatttgggtggggacacagagccaaaccatatccccagcccctcctccacactgtacttcaggcctccccacccaccttgttctggttctctgagtccctgctttgccagattgttttaatcagatcttgcagataatgttttccacttatcaccatcttagctctcaacttatccttacagtcttggttaagaccctttttgtccaacatcttggacacttgccgtcaactcagatggggatgcttgcaggggagcaggttcagagtggggaatatcggagctcagttggggacatgctgtttgctgtgcccataaatcttcccagttggaggtttaattctggagaaacagagagagaatgcctggccttttggggaggcaggcgagcaccagcacctcccaaactcactgtgtcccaggccactgtggggtaggagaggagaggcttactgtataaccctcactctactgaagcttccctagagctgagcggcagtgcttccctcccctggcccgcctccttctcatctttactcttccactgtgtgtctgcaaactgcacagcttgttagtgagatacgctaataaaccaccatgtcatcacattagcagtttccagctgagaatctcccttcctgctcggggtggcagacacccaaacacagccccatcatcaggctgtttgcacagctaattacttttttccaacatggaggcgagagacttcctgaggcttccactcactcagaattgctgttgtggatttcagaatggtccccctgccaggcttgtctggatgtcccaaagactttagggagtagccagattctgccctctcattggatagaacgggaggccgaggtccacagaggggctgactgctcccattttgcagatgaggaaactcaggcacagagaggtagagtggtgatgcatccaaagcagctcatggctggggacaagaggccaggcctcctatttcccacaacagggctcttcctggggtccatcttacctcttcccagctaggtggagaggcctttctccccagtgtagcggggtggtcaaagaggaacaggactttgtgtgtggccactggcacttagagaggaagggctcacttcttgcctcatctactgagtcctgaccacccttgcaccctccccaggtcttcctttaggaggttctctttttccagggctctcccaggttgcctgtgggctgcacctcccaggtcacctcttgcttccccatagcccagtcttcttggctaacactctccccacgtgcttctgtagggctgcccacacacacctggggttgacaggtgtccagacctggccacctccaggcatgatgactgctcagacacaggcatgtgcccaggttggtccaatgcaaacatgctgggtgcctccactggaatgagggggaaagagaggcactctttccctagatccgctggctctgtgagagtgaagcaagcctagagcttggatgggcagagtggcatcactcagggagcctgcttgggaagccaccccaggtaagagcactacctgccatgacacttgggtagaaatgacagaaaactcactgaaatggcttaacagaaaaagagaactcatattacctcacataaagctccactccatcctggtactctgagagttttggcaggactctcccaccccaactctgggctcaccttgcctctctgtgagcttcactccggcctgatgttttcctggaggtggcagggaaggcctcccattgcggtcacccaagcagaaggaggacacatctttcccaacactcacgccaatgtcctggggttgactccatctgcaccagttcgagtcccctgtgcaaccctgagccaatcactgtagtcaagggaagaggatgacctgattggtcatatcttgatcatgtgatgactggggccaccaatgactttgcactgccttctgcccccatgattcaccaagagcaagtaggttgctaagcaaccagctccagctcttttgtggcacttgggactgggaaagccaccccagggtcctgcatgttgaattacagggaaagtcacaccagtgtcctgcatgttgaattacagggaaagtcacaccagggttctgcatgttgaattacagggaaagtcacacaggggtcctgcatgttgaattatagggaaagtcactccagggtcctgcatgttgaattacagggaaagtcacgccaaggtcctgcatgttgaattatcaggaaagtcacacagtggtcctgcatgttgaattacagggaaagtcacgccaaggtcctgaatgttgaattactcagtacttggatgtcagccggctgtggttccttggaggagaagacagcagggtgattttggttaatcttcccagtgacacttactcactaagagaccttgggcaaattactcccttctctcttatgtaaaatgaagataataataggacctgcttcagggggttgattgaggatcaaacggtgtaatttgtgatggtgacttggaagaatgcctcacccacagcggggctcagttaagagagctaactgtagctggtattgggagctccatgcccacatctggtcaaaaccacccccatccccctctacctctccctctcccagataaagagagggggcagatttctaatttggacatcagcccatgtcacctcctcactaaaagctctttaatgacacctcatggacttcaaggtcaagttcagggtcctcaccctggtctacaaggttctgcaggatctagccctccccagctcagtccagccacatggcccctttctcattttcaaacacaccaagctcaatccagcaaacagactttgcctcttgccattccctccgcctggagcagtcttctcccagctaccactgtgaaatggtttgattgtgtccccacccaaatctcatcttgaattatggctcccataattcccatgtgtcgtgggagggacctggcagaaggtaactgaatcatgggggtgggtctttcccatgctattcttatgatggtgaataagtctcacgagatctgatcgttttataaaggggaggtcccctgcacacgctttcttgcctgctgctgtctaagacgtgactttgctcttcttttgccttcttgcagtgattgtggggtctcccagccacgtggaactgtgagtccattaaacctctttcctttataaatgacccagtctcaggtatgtattagccatgagagaacagactaatacacactatcaataacaccctcaattcatacaggtctcttttcaaatgtcatctcctcagagaagccttccctgagcatttactctaagataaaccacttcctcccacttcctttctgtccccgtcagcctgatacacatttcattgtatcacttatgattatctgaaaatatgttagcctcctgtttgtgtttttatcacatgtaaaggatatttggggcttggagggtatagtctagacaaggtaagtcagaaaggaagaaagccaagtcctagggcacagactgagactgctcttactggatgatcaaaggcttctgttcaaagggaagctttgctggatcccagtgagccagttaatggtgtccctggacaccagaacaagttgctgcttgctagagtttgccaggtagtcctggctgctgcatcctctctcctgcatcttctggacagttctaggcgttggggagtgattggtgctaggtgagaagcagcctctgaataaacattcgggagtcagtgggggtcagtggtagttgagcatgtgggctttgaagtcagaactgggtttgaatccagtattagtccattcttacgctgctataaagacatacctgagactggataatttgtaaagaaaagaggtttaatcaactcacatttccataggctgtacatgaagcatggatgggagacctcaggaaacttatagtcatggtgagaagtgaggaggaagggagcacgtcctgcattgctggagcatgaggaaaagagagagatggaagggggaagtgctacacactttcaagaaaccagatctcatgagaactctatcaccagacagcactaggcgggtgttaaaccattagaaatcaccccattattcaatcacctcccaccaggttctcctccaacactgggatttacaagttgacatgagatttgggtagggacccagaacaaaactgtatcaaatcccaaactccacttccatagccaagaacttggtggttattgattgagggcctcctaggggccagccccttgctacatactttgcatgaactctcttgtctcatgtgtaagtaccacaggctaatgtctgcacctgtgcaccctctataatgatatctctcattttcatgattgagcagactgtaatggttgttgtgagcagaatagcggactctgagtgaagaaccttggcattcatgcctctaactgcagggaaatccttccactgcctaaagcctgccctcaggtctcctgtgaattcgctcaagctaccctcgagccccccaggccccatccatccactcaacaacatttacataggccaggcaaggcaccctgggggacagagacaagccagtcatatctgtgtccttgggaagctcaggtcaagggtgctttccccccactgttaacaaggttcttccctctccaggcctccgagcctccaactctcaaaaggtgcagctgtttattgccactgctcacatttacaccctgagacgaatataccattttacccaaaggacctcagaattggatgattttatttgcctaagaaatgctttacttgacttgtaatctagagatggcaaaatgtatagcttttgaatatgcatttagatctgttttgacaaatgcacaaacccctatcatgcaaactcttatcacaatataggacattgccctcatttcaaaacctcccttgcatcccatcttgtcaaccccacacaccaatccccagcagctgcctgttttctgattgcctttaccgtaaattaacatcgctagttctagatgttgtatcaaaagaatgtatagcatgcactcttgtgtctagcttcttttgcccaacatactgttgtaaaattaatccatacaattgtatgtcaatagtgcattccttttcataactacgtactaagtatcatttataaaagtgaacctcggctggacatggtggctcatgcctataatcccaacactttcggggctgaggcaggaggattgcttgaggccaggaaatcaggaccagcctaggcaatatattaagggcttatctctacaaaaatcttgttaaaagattacctacacatggtggcatgtgcctgtagtctcagctacttcagaggctgaggtgggaggatcgcttgagcccaagagcttgtggtaagctgggcaacagagtgaggccttgcctcaaaaacaaaaacaaaaaagtgcctcgatttgttcatccacgatctccccaatacctagagctatgtctagctgccttttttttttttttttttttttttttttttttttttttttgagacagggtctcaatctgtcacccaggctggagtgcagtagtgcaatcatggctcactgcaacctcaacccctagagctcaagtaatcctccccactcagcctcccgagtagcttggactacaggtatgagtcaccacatctgactagtttttaaatgctttgtagagacagggtctcaccattttgccctggctgctgctatggtttgaacggtggcatcccctccaaaattcacattgagacttagtccccattgcaacaatataagcagtgtggcttttgggaggagattaagtcatgagggctccccgctcatgaatggaataagcacccttataaaagggctcgcaattgaagggggcattctcgtgtctttcattgaggacacagtgttcctactctctgggccagccagacggcaacaaggcaccatcttggaagcagagagatgccttgagcagacaccagcgctgcagtgccttgaccttggacttctcagcctccagaactgtgagaaatacatttctattgtttataaattacccagtctgtggtatgctgtcctagctgcacaggcggactaagatactagcctacggtgaatgctcagaaatacttgttgcaggcatgaatccgggacatagcaaggacactgtttacaatgaggaagaaagacaaaggagaggaaatgagaacccagcctcactccttcttcaaaaattgtctcagtagtaaaaaggatgaaagctggctctccactcaacctgtcagacctctcttcagaaatgcaggggaagctgccacctggtgaataattcacctgcagtcagcagccccaaatgctgcattggcaaaaagcaaacagcctgcagaactgtttcttatttttaatctgctcagaaccagggtcttgaagcatttgcttttccatcctactaattttggaggcaattagctgttgggtgttcttgccgtcggctcccctctgtgtgtatgtccttgttaggtgtgctcaccctgcccaaacacaccagctgtgaagcgctttgttaatttactcttaaactaccattttaacaagcttcttaagtgatagaggcatttgtgcataaatagcaagtggtaagcttccccctggaacattaacctgatttattaaaaacactgtgactaccaagctttatacatcaacatctttaacacaaaaaaatatatgatctcatctcctcccacagccccagccctaatgtagacagagagctctgatgggaggtgagaacctggaagatgtcactgtgaaaggcgaaagaagccagttttttaatatttcaaatgcagccgagccagccaaccaaaacgtgttttctccgacattagcctggggacaagtggaaaaaaacagacacaatttctttccatgaccaaaccttcccacctagctgggccaaggatgaggtcaccctaacacctctctctgtgactctgatgggctggggggatgggctgagagtgggggaacaccccaacgaacttaaatttcaatgcccaaaccgcaccccaccacctgccagaaactcagcatttcctaagcaccctccatgcacacactcctcatgaatgttgttttgggtcatctcactgcaccacctgtacaattatttcactaatgttatttttaaatggatcactttaaaaattttagcctcaaaccaaacaatattgtctgtgaaattgtagatttcatgcattagttatatatggtgtttctttaaaactttaaagatgaaatagtgaaatagataatgcactctggtgtaccatgtactattggtgtgacacataacacaccagggaaatgctgaattaattccatattccaaagttcagagcaaacaatgtttcctgggacttagacggtgtctaatactttgaagattcaaagttaagcttagttttccagtccagaggcttctgtgcaagagactacatccatcagccagcagcagacgcacactgcatctgaccgaatacctgcttcccttctcctgagaagtacaggagcaccgtgtggggtggataatgaaggagatgatgtcctggtgtgtgtgtgtgtgtgtgtgtgtgtgtgtgtgtgtgtgtgtggtttagttataggtgaataattagattacgtgatttcaggaactctttgggaaatagaagaagggtggcacagtgagaagaatgaagctggggtcagtaaatgcagggtcttgacttcagtctgtgtctaaccattgccatctcttgcctggactattgtagtctcctaactggtcttccagcttcaccctcggccaccaccctgtgttctccattcagagccagggtgggcctttcagcccaagtcagctcatcacattccatcactcagagtcctctagggacccaccctctcatgcaaaataaaagccaaagtcttccccatggcctgcaaggccctccatggcctgacccctcatcctctcttcaacctccacccctgccactccccacctcactcccctgctgcagccacatgggcctctgtgctgctcccccagccccttgagaaccctcctgcctcagggtctttgcacttgcgggtccctctgccaaggctgctcttccccagatatctgcctggctcatcctctcactccaggctctgcagatgtcacctcctccaagaggccctctctggtgccaccttctaaagagcaccctgttgctgcgtaatgactcagtttaccctatgctttttctcaatatgcatatatatgtctaatatctatgcgtcattgagtaaatgaggggaaaatgttctcagaggatgcagaagaacctgagcatgatactggcctgtgttagcggtgggtggggaatgaagcgctttgtgttatttaaatctttaaagaacaactgtattactcatgtaatgaagaatattgggggacgagtcagagaggggaaagaaaacagcctagaaacaagtaaatctgggtaagaaccaagatgagcaaggacttcctccctcctccatgcctcacccccgaggagcagcacattccatatggcagagcctgagatgctcacgtggaggctctgggcaaggactcgcctctctctgcagcaaccacaagtgactctgaatataaaacaaggtcacaggtgactcacagatccaaagaagtgttttgctgggtctctatggtgctttaaaaattagatgtcacccaaacatctggatttctgctttctcttagacaaatgagtagccacagccactgagaagtagcaatgctcttcaaatggggcctgggctccccgcttcgccatagcccccacctctccccactgccttctcagccccgagactgagtcaaagtcacctttgttattacactcagcttgctgcattccttcttgtaaagttcagagggagtcggagtatttattgtactcatgtctttataaaaaaatgggaaactaagaggaccacgtggttctagattttttagaattctggaagaccaggagttttctgcttgggctgcctgagtgactctgagccaagcctctccaggcctgtgagtctgccactgttaggtcaaccagccaggatgctaatggggatgaagtcagcacaagctagttttctactggtggcccagaaacccaggagacactctcagctttggcccagaattcatctgccacatttttccttgatgtgctccaactttgcggggggttccttgggcctaggattcctacaccgtgttttctcctctctcttggattaaggagcaggatctcaggggcaacctggcatggggcaggcagagaaagaagaaagcacagctcgaggcctgcttctttccaagcatttcctttcttacccgtgttctttagtttcctcttaagggttgaactgtttgcttactctgtctgtctctttcttgcttgtttgctattgctccatcttcatctctatctcggtctctcatatagagagagaaacaggctcgcaactgaaccaccagccccaccctcatctttgtacttgcagcgtgccagagcactggattaagagtctgaaaaataaggcaggacacacacaccccagcccccaaccactagccatttccacagtcttcaataagccacgtacttctcatctacaaatgtatatgtcataggttactttaggtctaacatttaactatacatttctaggataattccagaatattctaagtcaccaaacctaggtcagtggagaggtcagggcatgggcgctcaaattagaagtcccgggcttgaatcctgacttgctactctctttgggacctgtgcaaaggactcaaccaccctgtgcctcagttgcctcatctgtaatatggggagaataacaacatcaccccttctgaggttgttctaaatattgtgaaagaggcagaattttacctccacccggtttttagctgggcctgagaatgaaattgacataagactgatcaacagaagaaacacacacacatttactctatttaattcaagttttacatggtacagaagacccaaagatacaattagttaaatacttatatttcgtattggacaaagagcagtaattggtagaagagcaactaaattatgtgggaggctaaaaaaaaattattataacaaggtctgtagggaattctctaatctcaacttgcagcccttgttgataagaatgtgactttccagctgggcgtggtggctcacgcctgtaatcccagcactttgggaggctgaggtgggtggatcacaaggtcaggagatggagaccatcctggctaacagggtgaaaccccatctctactaaaaatacaaaaaattagtggggtgtggtggcgggcgcctgtagtcccagctactcgggaggctgaggcaggggaatggcgcgaacccgggaggcagagcttgcagtgagccgagatcgcaccactgcactccagcctgggtgacagagtgagactccgtctcaaaaaaaaaaaaaaaaaaaaaaaagaatgttactttccttctagggatatagggagggcatcgctcacataggaatttcacctcctacttttacaaaacagaatgaaggtcaggatgatcttcttgtgcctgctgtgttggaagcacctgtaattcaaaatagccaacatgccagagcagcatatttcaaggcagcatattcttaactgcttcgataccaattcagaaaatacacataaagcctatgcatagtgcaacgctgtgcatagcaagcacttaatatatgttagccttctagaagtttacatcttgtagttcacacatatagtgcaacaatataacagtctgccatcgggatcctttctacagatgagtttgttttgggtccttcccccaagatgttaacaaatttttttctttaattagctaccaacttcttttttattttatttatatatttttgagacagagtctcactcagatgcccaggctggattgcagtggcgtaatctcagctcactgcaatctctgcctcccctgttcaggcgattctcgtacctcagcctcctgagtagctggaattaaaggcacgtgccaccacaccaggctaatttttgtatttttagtagagatggggtttcgccatgttggccaggctggtctcgaactcctgccttcaggtgatccacaagcttcagcctgcaaaaatgttggcatgagccaccatgcctggccccaacttcctttctaattgggagattttacttttggctatgctcaaagagttggaagacctgctcatactgtttccctttccacatggggagtgtgtagtgagggctgctttctagactgagcacatcctcacctgtccaccataatcccctccacacccaattctctaattgacattaaccccactcccagcccctgtagatgctgagtttgcaacctctggctccagctcaagagatgagataaataaacctgcaaatagaactttcgagtgtggcacagagagaagttccaaaacaagcctgcaggtgttcataggagaagaggggctgcaggtctggcgtggtgagaggtggtctcaggtagaggctggggatagactatgaagtggaaaggcaggggtgaggggcagtgagcacctgtggggaagcaggaaagcacctgtgtcctgcaccatcctcctgccctgttgtcctcctgccaagctagaattcactcagcagcgcttgcccagcctcaggtgtccctagaacatccacagtccatgggatcggcttctgagctgtccacggtgcccatggccacacctgcttaccagccgcagcagactgggccccatcaggcctgaccacccaccccagaatagcactgtccccagcaggggttttgagaaagggctgggggacaaacaacagcaatcagaaaccacatctgggcagagcaaatccattgttttccacacagtaacgtgctcactgatgtggtggcaactcttggtgttcctgtaactcaatccagaatgaggacactggattcccaggacccacttatcagatgaggcttcctcccaacagtgccaaggcaaaccattcctgactctcagttattaccaaatcaagtcaaatgtcattgctagttttagctccaaaaagccaaggctcaaaattggttcctaaactcaaaatcaattaagcagatgtcgaagagggggaattgaatttcattaatgaacattggactgaaaaatcgtactgtgaattttttctcctccaccttctgctggctgtagttgtagaagcttctgggagaaaattctgatatggtcattgtcactggaagggagatggcagcaggccccagggaaagggcaggacacaaaggacacaggtataatcaatgggactctgaagccattgctcatctcctctctgagaagctccacccagaaactgtcctttcctgacgattttacttgtgatccaataacgctttgtccttggcagcaggttttctgttcaacaaggcatggcctataaggtgtgtttccaagtttggggagttggccagatagagccagtaaaccagccactggcctagggggcaacgtctgcaaagcagcttaatatccacccttccccacctctcccaatctgttcttcctccacctgccttcccatctctgtaaatggcaccaccatctgcccaacagctcagccaacatccaggagtcatccccgattcctcttccctcacctgcccacctgagatccatcagcaagccctgccgatcttccaagcagcaccgcaatccactcacctctctccctctgcagcgccccgtctgctccgcgccatcagcctctcccacctggcccactgcaaacaccacctgatctccctgcttccactcttgtccctgggccaccctcttcacccagggggtgggcctttaagaacatgaagggcatatccttcacttacttagaatgcatcaatggcctttcatcgttcttagaattaaatccaagccctcttgcaaggcctcctggtcctccatgatcagcctttgttgctcctctgttctcatctcccatcccttgctacacacgctcagaggctcagaggcgtgtgtgcctggggagcagtgattgatcaggccctgatcacgaagtcagtgtgtggccttcaatataatagatggagatgttctcattcaacaaaattctgaatggcaaataattttttttttgcttttaatctagtttggtgggggcacacttgaaatgcaacagtctgggatattctctaaaaagcacctgatttctacctggtgtggaccctcagggcaatgagcagtggcgactccacccctgatgttccggggtttgaggattgactgtatccttaagcctcagacacaagagccactgactgccacatagcactccttaaatgtcataagcatggccccaacattaaatgcctgggactcactcttggcaatgtttttcccttttccagcctccatccttaacagtcagggagaaagtctcaggggctcattgccttgaacgcctctctcctactcacgctcggaaataggcacttacaaaccaccgtgaaggcagcaatgtgctgaagtttaataactgcactgtgcttggttttacaatggcctcttacttacgtcagtggatattgctttcctattcacagtccaaaattactcaaccatagaaatacaaacctcaggtaattctacagatggcattgcgttattgaaaaatggtgcaactgtatgtgcatagctgatattgggaacccctgagctacagcggttgctcctcaaggcaagaaccatgaattgccatctgggtgccccagagcctggccaaatcctgacctccaaagaggctcaccaaaggtttgtttgggttgaattaagccagtcacacctgttcacagtgtatttctaaaaaatccattcctgccatagactttctagccaaaggacaccgttcagacaaggtcccgttttcactgcgtttctctccccgtagagaaagggagaatctatacaaggtaccactctccacctgtaccccacaatttggaaacagaatgggcttctcaccttgctgtgtccagcccgagtcctcccaaccagatgcaagttagggttgtgaaagttgtcagaatcaaaatggagtcactggtgtttaaaaaacaaaccaacaaaaaacctggacaaatagagctggggaaggccgtgaagagagggttctcaggcttgtatgcctgataacaaaaccatcacaaaagactgtgaaaaccacaaccttgcaaaaaggtcaccgcagccttacacaaaaaatacttctgcaaggacatctgcctagaaactgcctgtccaaccttggactgaggtcacccttgttattggtctttgcagtcaaggataattatttcaaaacaattctttaatctttctcatttttccctctaaaaacctctgtctgcctttacctccctgaattcgcacatcgtttacaatggcatccatattctcattgcaaggcttgattcctgaatatgtatcttttccttttagagaacttctctctgtaatttaggttgacagggtggacacctatacaccctctctaggacagggaggaaccctgggattatcttggtggagaaatctccagcacagagaactgtcagaacagttgcatggatgagcagaaaagagcagatgctaagtttttccctgacccccactgctgcatgtcggctgtaattggatgcaagaaaatgtgttaacttttttgtggacaagcatcattgacctgggttgaaccagacatacagaaggcccatcccccttctcatccaccatctcttggaaggagcttggtcaccttcaaaggccagtttcttagttggagaggaaggtctagttctttgcagaaagaacacacactgtgtgtgtgtgtgtgtgtgtgtgtgtgtgtgtgtgtgtgtgtgtgtgtgtgtgtgtgtctgtctgtctgtctgtcggtctgtcttgctttctgtaaagaactaaggctccttggtgctgatctagtagggagagtcaccaggggtggaagctgacagaggccacagatgccagggactctcagaccactgcatccactccctggcattcatctccagaaacactcactcagggtgcaaggtgcatgtagaaagacatctagcaacattatttataacagtgaaaaatgaactttcaaatgggaacaattcaatgtcttctcccagagactggctaaatagcacagtcattaaggacctgggctctgagttcaaatcttgtttcttccgcttacaatatatgcataccatatacacacataaattcacctacacatctacctatcgtacgtcataaacacacattcgtagagtctccactttctatggccttcctagctctgccctcccctgtgtcttcatctcacctgtagcttcctttctgatgccagcatattctgttggttttcatcaagattcatcaatacaaaattataatccaggcctaacatttagctgacttcaaccaaggattctacagtaagcatttattgatcccaagtgagaagttctggggttcaattaccaacctggtggttcaggtgaaaagcctggaaaccttccccttccctttccccttgacctcagtccccattctccctggagtggggcagtggccccagctctacacaagccccttcatcatctctctcctgattatcacactggctttctctacagtctctgggcttctaccgttgcccctgactgcctgtcatccacatgaagccagagggtcttactgggacctaagtcacatcatgcctctcctctgcttaaagccacctgatccacatccctaggaaaaaacccaaaccctcaccacagcctatgaggccccatataacatagcccttcccgacttctctaagctcaagtccaccttgcaaagttctgcctagaaacaagactcccttaacagtatccacaatctggaaatgcccatccgtggcccatgcgacccattctaaatgccaccatattcccatgtgtcaaatcgtcaacgcaagccctgggctctgtttgctgcctggatgaaaattctttttgaaaactgcctgaaaatcatctatatgcctgatgattaatgcacactgttacacgaggagcaacttggtttcatccaaattatctattcttggcaacgaaaagactgattcatgtttctaataatgaattccaaaaggctacagatttgcaattggatcatcaccaatttaagagtcgatggcaattggatcatcaccaatttaagagttgattgcaaagtcttgccttgaagatctttatatttgcttctagcaacaatgttccaaactctgttgtcctttgacagtggacagaggcttaggcccacccctaacctgatcaatggctggcacttcttagcagaacccttgagagcctccaggatccgtatcccaccttgctctccagtctcaggtcctgctgcccttccccagggtcactatgctccagccacacctgccgcaggccctttgcacatgcaaagctggtccctctggaatctgccttttaggcagtggtgtgacaggagcatctaaattccatttagcagacagaaaatagtgtggaggagataaagaagccaagcaaagaagaaggctgggagagagggagtgtgtttggtgatctgttgcttctttcaggatgcaggattcgtgcttcatgcttttatttttttcctcttgcctctaaattcacagatctgaaggaaaagaattaagtggatatttacacaaaggcagacccgatgccagctcacagatactgatctgtataatgtctcctggcatgaacaatgagagcgtttctttgaacagcagaagctatagcagagcaaaaacttaactgtgttgaagtcaaaagaaaaatatttgcaatttgctcagccaatagaccggcaggaaagccctttgagaccgcttctgcagatagaatttctcccatgggcccagctgagtgtgttggtggcagcccaggacccgagtcagataatcagcctgtctgtaaacaatccttccaattcaacagacaacctgtccccagggaaagggacagccgcagcccaatctgagggagtgaacatttctggtcttctcctatctgccagcacactgggctgcagaggtgggtgagaggaagttccagctctcaagccatgggggactcaatgagggctttgttttgttgttgttgttgttgttgttgctgctgttttgagacagagtctcactctgtcgcccaggctggagtgcagtggcacaatcttggctcactgcaacctccacctcccaggttcaagccatcctcccacctcagcctcccaagtagctaggattacaagtgtgtaccacccatgcccggctaatttttgtattttttttttgtagaggtaggatttcaccatgtttgccaggctggtctcaaactcctgacctcaagtgatctgccctcctcggcctctcaaagcgctgggattacaggcgtgagccactatgtctggcctcagtgaggggtttaaaccagctgggggctggtgctttgagctgtttcagtcccagatcctccactcactagctcagtttccccatgaaccagccagtgaggaacctctgtttcttccactatgaaatggggaaatgggactgctataagaactcagtctaatagggatgtgtgtgaaagcctcttgtcaaaggatcccataacaaaaattattcatgttagttttaaatggcaaaataaacaaaatgataaaaaaaaaaaaagagagagagagagagagagaacattccactgtgatgcctgaaccataagaaagggtgggtgagggaggccgggacaaccaacctccctctgctctttgctctctatggtaatttttctagtttttgggcgaagtgagccttcaggtcctgcgcagatatagacttttggtggcaatttgttttaaatgagagagagaggcgttgtgagcaagcagggccttggctgcgtcactgtcgctgtggccttgaaagagcctgtttgttgctgccatctgtgggggaacccggacaccaccccaaagtcatgatgcaaggactcagagaggactccagtttcttcagggggggatgggctgactgtggtatctctcctgggaactgtaacagcagcctgaggggtctccccatgtccccttgcccccatcttccattctcctccgatagctggaggcctcttcctaaagtggcaaatcacatcacagcacttagcaaggctggcactgggggagagcagtgaagagcaggggggaccaaagtgaaggagacctcgctcccagattgtgtaagtgccaggcactcactttgccttaggtccagtccggtactcacctgctcatacctccccggcttctcaaggctctcagaataaaatgcaaactccctgccagagccatccggggaagtgatacctggtccctgcccacccctctcctgcttctcaattcccctccagtcccaccagcttctttctgttgctgggacgactcaaactttatcctgcccagaaggaaaaaagtgttttcctgtatttttcctgtatacgcacaatacttctgataccaaatatatgggttttccgctggcattcagcaattcttcagctccctggtcaccaactgggcatcctacaatttaattctggcactaactacctacagtgagtgcagacccacagggtaagggctcagtcccacaagactgccccctacttcagacaccagccacaagtcctggattgtgatccacgcttctgaccaaaaggctgtaaatcaggagtttccacgacccactcctttcaataatttgctaggacagctcacaacactggtttattatgaagggaatcacgaaggatacagatgaacaaacagatggagagacaaccggggcaagtgtagatagaggcccagaacttgcttgtcttctcccaggtgccacccttctagcacctggatgtcgtcaccaaccaggaagctcttggaatcccattgattagggtttgtatggaggcttcattatgtagccataattgactaattcatcgaccttcagtgattagtcaatttccagtccctttcttggaccctagaggttgggggggatggaactctcctggttggatcctccggcaaccaatccccattctccaagggtaacctcattagcataaagtcaggtatggttgaaaggagcttattatgaaaaacaaaagatactcctctcacctctatcacttaggaaattccaagggtttaagacctctgtgacaggaacctggagaaagactaaatatacatttcttaatataatatatgtcagtatcattgcaccagggtctttgcactttttcttccttatccctggaatagtttttccccagattttgtatgatgagctccttcttctgtactaaatcttagcacaaatgtcacctcctcagagagtcctgccctggctaccctacctaagatgatgcctctaacccaggcactctctgtattttatatcctgtttcatttctctcttagtccttactgcagcctacaattatttagtacctgtcacccccactggaaggtcagctccaccagggcagagactgggtctgggttgtgcacagctctctccccagcaccttgtccagcacttggcacatagtaggcaccaactaaatatttagataattaaaggaatggagattctgttaaggtcctttcagttctgcagtgagggaggctcagctcggcagggctgggccataacccaggtctacacggctcagaggcctctatcactgacacccttccccagccaccctccatgggtcaccaaggagtagctgacctctctgagttttctgtgccagaagctctagcagcaggggtgctatttggaagaccatgacaatggccctagggtatgatgctctgtttctcccacctccatctcttttccatatttttggctctgccctagcattaagatagccagtcacccagtctccccaggcctgtgctttctgctgtgtttggccaataagagcagagaggggcagtagcctcccaccctccttgctgggtcctgatgcagctgtggctgttgctatggtttgaatatttgccccatccaaaactcacattaaaattttatctccaatgtgacagacagtattgacaggtggggcctctaagaggtgattgggtcatgaaggctctgcccttgtgaatggattaatcccttcattgatcatgtgagtgtgactgatggttttataagaagaggtaaagagatcagagctagcacattagtttgttcagttctccatcccccatgtgatgccctgcatacctcaggactatgcagagagtccccaccagcaagaaggccctcaccagacacagcaccttgaccttggacttctcagtttccattattataagaaagaaattctttttctttataaattacccagtttcaggtattctgatataagtataaagcaaaaataaaatccaaagcttctccaaccaactgaacagacccactctgggccaaggggaccctagagaaacctgaaaaactgaattcctggccattggaaaaagaggttgaacataccccattatactcgctgccttttggagtttaggcacaattgactagcattaacattaaaatagagatcataaaactgacaaaacagactctttgtgaaaaaaagaccaaattcaaagcctgactctagtatagcatcacatgacagatagcaaactctgaaggaaatcaaaatattttaccccaaaatatatttcattgacatattttgagatggccttgcaaggctgtcttttgtgggggagatttgtatgtgtagagtatctccagaaatgcagccaggcttttcaaggatctaggagagattaactaagagtctgacacattttaaggtccaaaaagtgatatttaccatctattctctctgaagcccattacctggaggcttcatctacataacaagaaccttggcttccacaaacccctctcatctttttttttttttttttttttgagatgtctcgctctgtcgcctgggctggagtgcagtggcctgatcttggctcactgcaacctccactttccagttcaagcaattctcctgcctcagccactcaagtatctgggattacaggtgcccattaccatgcccagataatttttgtaattttagtagatacagtgtttcaacatgttggtcaggctggtcttgaactcctgacctcaagcaatcctcctgcctcagcctcctaaagtgctgggattacaggcataagccaccgcacctggcccctcctcttatcttaactcaagcatttctttctactgactttaagtgtttagacaaagcctaactttttcaactaattgccaatcagaaaatctttgaatccacctgtgacctgtaagtcctccctccccttcaagatgtccccacccttccaggccaatgtataccttacatgtattgatttatgtctttgtctgtaacttctgtctccctaaagtatataaaaccaaactgtcaccttactgccttggacacactttctcaggacctgttgagaccgttctccaggccatggtcacttatatggactcagaataaacctttttaaatattgtaccgagtttttttcttttaacataagcaacagaaaatggacgaagacagcagtgttcctcttcctgtggtctcagcatctcatgggcaatcctctcttacagctgcagttctcacaagctctagtaactcccttgctcccagcgcctccagtcccagggctggtaagggttcccatctgtttctagtccctggggttctgggaaaagtacttaacccctctgtgcctcacaatcctcatctacataacaagaacgataatggcacctacctcactgagccattggaacaattaaatgagataatatgaggtagtgcctagaatagtacctggtatataataagcatgattattattgttgttattattttattaccattattggctattgctgttattattttattactgccatttcctgtgttaagcactaatctcatagtatctcattggatcctcttattatttcaattttacacttgaggcaacggcagcttaggcaaacccagccagttttccagcatgatccagttagaacatagcagaatcaggcctcaagttttcgtctgactgctcagcctaagatcttgaccaccaagacaggtttccccctgcccctttatctattcaaagtccatagttgcgtgagggggctggcctgtgcattgcaggatgtttacctatatccatggcctctatccactagatgccagccatccacaacaaagaaagatctaaccaaaaatgtcagtagggacaaggttgagagatcctggtatgacgcttatgcagatacaagaaaagccataattatggaggtaagtgctctacatttgactcaaactgatgaaatgatgacatcagtagactaatttacatgtatacctagaataaccactaaaaaagctacctggagagatacacttaaaaataccatagatatatcaaaccagaactctaaaaaatattcaaataactcacaggaagaccacaaaaaaagaaaggaaaataaaacagaaaaattaaaaccagaagaagcaaacaaaaaataaaatggcagacttaagccctagtatggtaacgacattaaatgttgatagttgtattagtctcttctcacattgctataaagaaatacctgagacagggtaatttattttaaaaaggggtttaattggcctacagctctgcaggctgtacaggaagcatgggtgggaaggcctcagggagcttttactcatggcagaatgcgaagccagagaaagcatcttacgtggctggagcaggaggaagcggggtggggagatgctacacactttgaaacaacaagatctcatgagaactcactcactatacagtaccaaggtgtatggtgctgaaccactcatgagaactccatccccatgatccaatcacctcccaccaggccccacctccaacactggggattacaatacaagatgagatttggatgcggacacagacccaaaccctatcaatgatctaattaaaacaaaagattggcagagtgagtttaaaacatgacccaattatatgttgtcacaagaaactcacctcaaatgtaactagataggcagtaacaaaccaggagcagaattcttgaaattccagaaagaaaacaagaatattgtgaatggataaaaatagggtaaacataaacgattttactagttttcacctcatgagtttcttatattatatgtgttggttgaaacaaaaataataacatcatgtgatgtgattctcaatgtatgaaagcaacacttaagacaattatattgtaaaagcgtgaaggggaaagggacctaagtagcaggaaggcctggatgcttcaggctaagtgttgaaacagtgatagcagtatttacaataaactgtgtatgtatataggcagccactgagcaaaatatacaaagcaatatactctaatacataaataaatcaaaatggaattctaaaaatcattcagaaacccacaggaaggcaagaaaagagaaacagagggtaaacagagaaaataaataataaaatctcagttcttagctctaacatatccgtaattacttcaaatgtcaatggtctaactgtactgattaagagagagagtggattgagaaatacaagtcaggtacatctgcatacaagaaactcacttcaaatataatgacacataagctgaaacctaaagaatggataaagttgtatcatgggccaggtccagcggctcatgcctgtaatcccagcactttgggaggccaaggtgggtggatcatctgaggtcaggagttcaaaaccagcctggccaacatggtaaaacccggtctctactaaaaacagaaaaaattagctgggtgtggtggtgcatgcctgtaatcccagctacttgggaggctgaggcagcagaattgcttgagcctggaaggtggaggttgcagtgagctgagttcgagccattgcacactagcctaggcaacaagagtgaaacgccatctcaaaaaaaaaaaaaaaagttgtatcatgcggatattgatttaataaaatggagtgtttatattaatattagattaaatagactttagagcaaagacattagtagggtcaataagagacattacataagtataaaaggatcaatccatagagaagaatagtgatcctaaatgtgtatgcaccaaccaatggagctttgaaatacatgaaacaaaaactgatagagctgaaaggagaaatagataaatccacaattacaactggagatgtcaggacctaagatatcagcatttgacattttctatcagtaattgacacatctagtagacagatctaacaggaaggaaatcagtaaggatacagttaaactgaacaatatcataaatcaactggatctaattgacatgtatagtttacttcatccaacaacaacagaaatgtacattcttcctaagcttacatgggacattcaccaaggtagattgtctcctggtttataaagtagagtttaacaaagtttaaaaaattgaaaccacaaagagaacactctcttaccataatgaaataaactagaaatcaataatagaaagacaacaggaaaatcttcaaatgtatgactattaaacagctcaattctacataacccatgagtaaaagaagaagtctccaagaaaataaaaaaaaatacatagaactgaatgataatgaaaatacgacatatcaaaatgtgtgagatgtagttaaagtcatgctgagaaataactttggagtactaagtgcctacattagaaaaaaaggaaaaagctcaaatcaataatccaagtcctacctcaagaaagtaggtaaaaagagtaaagtaaacccaaagtgagcagaaagaaggaaataataaagataagaacagaaacgaatgaagttgaaaacagaaaagcaaaacataaaatcaatgaaacaaagaataggttctttgaaaggctcaatataattgacatatgtttgcaagattgacaaagataaaaagagaaacaaatcattaatcccaggaacaaaacagaggatatcactacagattctatggtcattaaagggataaaaagaaaatgctatgaataactttatactcataaattctataatttgtaagaaattgaccagcttttaaaaaccataagctaccaaatccaatcaagatgaaactaattaccatagtaacactataagatcctgaaaaagaatctccaggccaagatggtttcactggagaattttagctaacatttaaaaagaacattttataccaatgttacagtgtcttccagaaaatagaagagagaacacttcccagctcattttatgaggccaatactattttgatacccaatccagataaaaatagaaatagaaaactatataaaaagtaaaaaattgaaaactataaaaatagaaaactatagacaaatatctctcacaaacttagatataaaaatcttcaaatacattacaaaattgaattcaacaatgtatagaaaacactacatgacatgaccaaggaggattaatgccaagtatgcaaggctagtttaatattcaaaacatcaatcaatataatccaccgtatccacaggctgaagaagaaaaatctttttaattgatgcagaagaaacacttattcatgataaaaatgctcagcacactagaattggagggtaatgttctcaatctcgtaaaaatcatcaatgaaaacctaaacttaacatcatgcttcatggtgaaaaactgaatgttttgcctctaccaccaggaatgaggcatcaagatagataatatcctgcttggataaaaagaaaaatgtcccttttcaccccttttattcaacatagtactagaagttctagacaatacaataaggcaagaaaaagaaatagaaggtaaacagaagaaatgcagcagtctctatttgaagatgacatcattgcctacaaagaaaatcccaaagaatctaccaaaacaaggaaccctcctagaataatttagtgagttcagcaagattgtgtgatacaagatgaatatacaaaatcaattgcatttatatatcctaataataaacaaatagaacctgaaatttaaagtgcaataccacatacagttgctccaaagaaaacgaaatacttaggtgtaaaatcagcaaaacatggaaaagatttatatgctgaaaattataaaatcttgatgaaagaaattaaagaactaaacaactggaacaactttgtttatggactgggagacaacatagtgaaaatgccaattctctccctaattcattgatgtttaatgcaatttctgttaaaatcccaaatggctttttggagacataaacaagccaatgggcttctcactctatctctgctggtgccacaggggaaggaagctcctacctggccttcttttgctgctgggtagagaaacagatgttgagaggtcccagtaggtgactgccatgagttgagggtggagactcaaagcctggttcaccttcttctgctgggtggaagcctcagggacaccaggtctaagttaccctctgccattagatggaggggctggagactccaggttttctggtaccacaaagaagggatgcatgtgtccagtgagcatggggtgtgggacaggccaactaagccctggaagctttgctggagccactgctgctgctatgtgtgggctccatgacactgcccccttccagctgttgcatttggttttgagttcatgtatccctatttgtggttccgggttgccggcctctccagtgcctagtgtagggtgtatgggaagttacaacaacaacaacaacaagacaagtaactcaacttaggtgtcattatcaaagtcctaaggttcttagccagtgcatcttcttcattccgtctttcagagcgctttatgcttgtctgttaaattatttctagggcatttagttgtattatgaggggaagagtagggaaaagtgaacctgtactatcttgttccataactataggacggtttcttttaaagctaaaaatagacttaccatagatccagaaattgcacttataggcctttattccacagaaataaaacatatgttcatgtaaaagcttctacagaaaatttcacagcaactttattcataatggccccacactggaaactataccaatgtccttcaatgggtgaatgattaaacaaaccctggaacatccataatgtggaatatgtcagcaataaaaaggagaaattattgctgcacacagcaaccaaaatgaacatcaagggaatgatgcttactagaagaataagccaacaccaaaatgttacatgctgtatgattccctttatataacatttttgaaatttaaaaaattctagagatggagatcagttagaggttgcagggggttagggactggctagtgtggtcctagagggaggcagagggacccttgaagtgacgggacagttctgtagcttgactatggtggtggttactcaaaaccgcatatgtgataaaattgcataactggtgaaatctacataagctctgtggattgcacctatgtcaatttccagcttgtcatattgtactttagtgatgcaagatgtgatgattgggggaggctgggtgaagggtacataggacctccttaaacagttccttgccactctctgtggatctaagttatttcacagtaaaaaaaaaaatttaaaaagccaaaacaaaacaatattgctaatttccaaccacaaaatattccttttaaactacccctggccccatcttctctctctgtctctgtttctccatctctctcttttcaggccactgtgaagacctatttgcaccaacctggaactttcatttttacctttttttttgagacggagtcttgctttgtcacccaagctggagtgcagtggtgccatcttggctcactgcaacctctacctcccaggttcaagtgattctcctgcctcagcctcctgagtagctgggattacaggcacacaccgctaagcctggctaatttttgtattttagtagagatggggttttaccatgttggccagactggtctagaactcctgacctcaggtgatcggactcccaaattgctgggattacaagagtgagccactaagcctggcccaacctggatctttctatctgaggttctgggagggctggcagaaagtggaaaaggggataactttttagtgcctgatttggtggtatttcatgtgaactaccttaatcatggagccgattctctaatccttctgtttatcagtggcccctgccccatcctttgggaaacgttccaggatgtttggcacttaacactgggtacaaactccccacccaacagcagccgttcctggtgccttcaaacaaaaggacatggaatggggtaatattatttggataattttcaaaaatgccctacaaacgataagtggatcaacagatagattccaagcatcatgggtatccctttgggttggcaattgcagctgcgcattaaccaggtccttgggatgatggttgaatgtgagttgtatcctgggcagatagactcacagatgtgcacacaaatgcacacacacaggacacacatatggacgctttgtgctcctccaagctgggcattttacagtcaattcatggatcagtcaatacatttggaaacttagtaggttattagagtttcagaaaaagtctcaagttcaaataaaatgtgtgtatgtgtttgtgtgtgcatctactcacagtcttatccacccaaatctcaggtgcagcagtggtgccaacatcatgactttatgtacataaacttggccagggaaggaagggaccttaatgtgcaaatgtcccacgtgccatcggtcaagcccaccaccttcacctttcaagtttcttattagaactctagactacacgcctgacaggctgtcaggttgagtttcctcttctgtatgacatgggacaagcaaagtggggagaacatcttctacagggtgaaatgtcttcatcctgtcttcctcaccccctttgccacttaatgattagctttaatctaactagaaccttttggggtttctgtaatgggaggcagaggtgcagtaagaaatcccctttactacccagtgaaatacaggggcgtctccaagggaagcccgtctcacctgcttcctgtctcccgccgagaacctgctccagcacagcctcccagtctctgccccaaaggtgagggtgggccctgtgggaaagagacaggggacagatggaggggcaagagggcaggggtcccaacctgcacagaggagcaaacctgcaccagattgaaacgtaagctgaatgtaattacttggttaattaaatactgacttttaactcaaaaagtgattaaaacaagctgcagaaagactgtccagaagcggggcagggaatgaatcaaagctttcaagaagagggaggaggaagagagggttgtcacaggcaggtctggcttgctcttcctactgtgtactgggcctactgcatgcagggggtgtggtctttggtctctgagcaggtgaggaattttggactgaggccaacatgcaaagtaggatttcagacttcttatatctttccacttcagaccccatctcttttcccagttgtctgagagtaccaggagctgctggtgcctaggaaccgggtcctgttcatccacgtttccttggaacagaatgcagtacccggcacgaggaggtgctccagaaatgcttgcagaacaaatgaacaaatgactacacagtagtattatgcacatgtgtgttccgatgagcacgtgtgcgcgtgtgtgtgtgttcactgtaggcaggagctgtgggtcatgtgttgtaggctggtcttaactcaccagctcagacacccatgatgtcagaggatctgtaaaactccctgagccgtgtttcctccccataattcccagcaaactccctggtcctctgtattcaaggcctcagcctgttttccaggtccttctaggcagctggggatggctggccccattccagagctcggtgtctgcctgggagacttaggacctttagagcctcagatgtccccagcctgggaagtcactcagccatgactcagccgggcctggatggggctcagcagaatcctcaggacccccacggcctcccaatgctccagtccctgccacctccacccacagcctttctcctcccgtgtccttcgtcacccatgacatcatcttgtgcgatcatcctggctgcacaatcaagcctttcaagctcctcacgccaccccaactctctccttattgttgatttaacctcaaggggaccattctcttgatgcttccacacctcgcttcttcagcctgcaaattccttggcagcccttttgtgcagaacaccccctggttccatctaccttgcaaagctggagttgctgttttatttccttgacttataggcaacaacaaaaaaaaaaaaaaaggaaaaaaatcactcagtgtgtattttttaatctccatcaagagactataatacaacctgtaccatttttgtctgagcactttctggctgagtttgggttgtagcagatgggattttatgaaggttgtaaaagtcaagctctcagcatgtcaaacaaatcagtgtgtgaaggagaaacattaaaagtaggaaaaatggctgtggcctgggatgcattcggaggctttggaaaataagcccacagacctggagcacaggtggccccgaaatttggctgaaaattgcctttcaagagcaaaagttgctgcagtcaccctcaaaggatcatgatctaaattctctactcctgagtggggaccgtggtgctctgggtttaaaaatacaaattccagcatcaactataactatatagtcttatggttaattctgcttgagttttcacctaggcataagctgtcttgtatgtagaactgcaatcgcattaggagaaagggatctgtgtatgagtcttgagaaattatggtaataaaaaatggcagcataaccaccattaagtcagaagaaagataattacttctcatgctgcctccctgggtgaacacactgacacggagatgaattcgcttcagcaaaacaggactaatctctgcagcacggtatctattccattaccccctgcttaattacatgtgattgtagcgtctaatttatactgatacccaatgcccaatagagcaccttcatgaagagtgggttagttgggaggtgggaaatttataaactggtttaattgcagtcatctttgagctgttttatgtgtgacctcagggagtgatggtggttactctaaattctcactaatgaaagacaagagggttatggccagttaatatcacggttctgagaacacagataaaggtgacaatttgtctgtttgctctataattcactaatagttattttctggataagtgggcagggaagattgaacatggggatttcactgtgtgatgcaacagaagcatacaagcagcattagtatacacgtaagtgaatattaaaatgactaaggtgcctccaggaagcacagctatagatctctatggacaaggtaaagtacacggatttttggtggacgagagttttcttatttattattattatatgtatatattttgagacagagtcttgccctgtagcccaggctggcatgcagcagcgtgatcatggctcgctgcaggcttaacctcctgggctcaagtgatcctctcactttagcctcccgagtagctgggactacagacatgcaccaccacacccaactaattttgtatgttttgtagagacagggtcccactatgttgtccaggctgctctcaaactcctgggctcaagtgatctgcccacctcagtcccccaaagtgctaagattacaggtgtgagccaagcacctggccaagagtttcctaaaggggaaaggcaggatccatcctcccatatgtgcaattccatttagggctctttttgggacagcacacctggttttacaactcctttctagaaagttcacttatgagctgattaatggcagtaatgatttagtgtaagcagagcgcagtagccctagggctgaggttctaacctgggctctgttcccactggctggtaaatccttggctgacctccccaggcttccatttccgcatcttgagagtagtgatgatatcagcgacactgcagggacattgtgttggattgagtgagatgaaggagagtataaatgcacagcacagaccggttctgagcctcccatttcagagcaggaagccgggcctccccctcgaggatgcactgagagaggccactgtgagatctggcagagggtgtcttgatgtcaggtgatcagaacacatggcagccttggacatctctgatacgactcctgctcatggagtcattcatttgacagatgttattaagttaagtaccagatcatagcaaccacaggagttataaagaggacatgtcacctgcttcaggggaacttagagcctaggaggtgaaacagatgtaacaagtgaacatgacaaagtttgcagcaggagctgctggttgcttacctcttctttgctaataaaaatgggatctgtttgggcagcaacaggtccagttcaaggggagagaacaaccctgtcaatcatgacaatcccacaggtgggcacttgagcactgctggccaaggagctggaagggccagtcagctggaggcttctgggaatatttttgtccttgctaaaatgggagaaaagtattctgatttcttttcagagttattgaaagctggaaagagcatagctcccaaccctccaaaggaaaaaaccagacaagcaacaagtgcatgccttttccagagcccaacaaaatcctgaggttgcagagcaaacaacagtccccaaatttacagagagagagagaggcacttgtggggagagaagagcctggcttatgtgggcaagatgtagctagaaacagtaagaacagtccagcaaaggtgatggttcccaacaggggccaatttttttccctaaggggtagctgggagtatctgaagaaagttttgattgttacaactgggttaagagtgttactggcatccagtgggccagggacactgctaaacattctgcagtgcacaggatagcccctacgacaaagaattatctggcccaaaatgtccacgatgttaaggctgagaaaccttgagctaagtcaacattgtctctagcctggacaactacaatacactaacaggtcccccaggtctgcccttgctccctaccatccattccccacatggccgccagttggcttccatgtaaaagaaaccagatcgtgccactcgtctatataaaatcctccaatggctcacatcttgagacttcaccatggcttcacagcgtgcagcatctgttccctccatggccttctgatttgataacatgctacccccttctgtcacttcgatccagccatatagtctctctgcatccctggaagacaccaagaacactcccatctcagagcctttgtacttgctctccctgcccgggatgctctttgcccttccaatgctcatggccacatctcactcccatctctgctccaacatctcatttgcaaagagaaaagaaagagcccacccacagtcccacactaggatagtgcttggcacaaaataggtgctcaaataaatatttgttgaaggaatcaataaataaaatgaagacctgcccccttgaactttcggttaactcaccccagcctcaaattgaaatcaaagaagttattagaaacctggaagagagcagaaaagggaactgagggagtgagtctgggactgggtgttggagctctgggttcacatctggttgggtcagcagctttcagatgtgtccctggataggtattttcctactctaagtctcagattatttgtaaaatgggcaaagaagccattcattcagtcatgtcttcattcaataaaaatttattgagcaactgctgagccaagcactgatgcaggtgatggggatccactaggaaacaagacagttccttctggaatgaatgaccacacatttatcagctttaaacaacacacgtacatgtgacaaactccatagttctgtaggtcagaagttcaacacagcatggctagatacgcttctcagaatctcattggcccaaaatcaaggtgtcagctagagatacggttctcacctggagctcggagtcctcttccaagcttctggtattagtagaattcgtttccttctcactttccacatggcccaaacagaaggcacattgaatccttccagagcttcaaatctctctgactttttggccattcttttctgttattcaaggctaatgagattccattgtatcctccgaaataactcaggttaatcttattatattcccaggttccagaaattagagcatggacatcttttaggggccgttctcctaatttacatgtggatgcatgtggagccagcattccaggcagaggaaacagcagaggcaaaggccataaaatactaatgggcttgatttgttcaaggagcctcaagcaaccaacatggctgggcagcagagcatggaagagggaaacaggtgaggaggccagggaggtggtgacttctaggccatgtggtgcttggtagacagcaggaaccagaatgggttttgttctaagtacttacggaactcatgggagcattttaagccagattgtaaaaataccaaaccaatgttttttaagaagataactttgacttctgtatggcaaaaagtaaatgtggaagcaggaagaccagtttggaggacatggccatggggacaatggcttggactaggacgtgggggtggaagtcatgagaagtggttgggttctggatctctttaaatgatttttttaagctgaattttctgatggagtaaaagatttgtcaatttccttctagctgacagcagaaggggtggctttgatcggctttcatctccctctccaggcctccccatatcgctccacctggaataaaaataaaagctaagaaaaacccatctatcggcacaagcacagcatccagactagtcaccttggcttgtcacagccctcgccacactgagacatagacatagacattgatagataaaaacttgattttataaaaatcaaaagacagtaataatgaggacattcagaaaatggagaaccatttagctggaatctgaaatagtataatacagcagcagcagttaccatcctttgagtacaaagtgtgagaatgctgcttgaagttggagattggaggctttggggagcagtttctttacttcgctgacatcctggacatcacacatgggccttacaaagttcacacacaagcctctgcagcctccgtctgcttgttctgagatcaaactgggcggccttcggctctggctttgattagctatgcacagcctgactgcctgaaactcatgcaatagagatgaatggaaaatgaggcttgtaattattttcaaaagacgtgcagcctgacttcagcccatgaagacttccaggcccctggaaaagcctggctctgtggacatgcgagctgtgcagtctcatggtgcctccgtttagaagggccccatgttaggtttaatgcttggctctcttgaaattctcaataagttttgaatgaggggccccatgttttcattttgtgcttggttctgctttgaaactgcctagaaaccatctttcccattttcattccagttgctcaaacccctttctcaaacctttcagagaggaaggtagcacaggggatattcctgggactgtggtgtggaggggtgtaggttggttacagcagctcctggatggttgatgatgaggatgctgcagatatgagcagggcgttagctgagtgagacttcaggataaaccaacctggaggtccatcttccaaggatggaggtatcattttacccgagtatggataatctggggcaaagagcagaaatgtccctagccccaaacctatcaacagagtagcaagggcccagtgataacctcatcaaacccatcttgaagtgggatgggcagggccaagaaataaaagaggaagaaactaaccaggagcctcggccacactccaggcttgttctgtgtccagccgggctcactgcaacttggttttcagggtatgagctgagcggcagtacaacctgtgttgtttagcaacacagtaccttccccgtttactgctgtaaggtgttaacgaggaggcaaatgaattacaactgacagtttacaaagcaaaggggtccaggcatggtggctcacacttctaatcccagcactttgggaagccaaggtgggaggatcgcttgagtccaggcatttgagatcagcctgggcaacagagtgaggccccatctctacacaaaagaaaaacaacaacaacaacaacaacaacaattagccagatgtggtggtgcattactgtggtcccagctactcggaaggctgaggtgggaggattgcttgagccaaggagtttgaggttacagtgagccgtgattgcgccactgcactcccacctgggtgatagagagagagagagagagagaccctgtctctaaaataaaataaaacatacaaagcaaagagatgccattgctcttgctgcttcgtccccactcctctgagatggaggaagagtagccgctgttttaatagacggtcactaagagttagctgctcctgggtgtctatctttgtgcacacgtgatttctttaaggctctgaatttcctatagtgctctgcacagagcagtctttaggagaagagacatctggatatctatgaaatcagtattaaaaatatattctaggtcacccaattcccaaccgtagttcccaggtaaggtgtcaagggtggaaacatcctggttgatgtcatactgtctgcagtgaatggagctaggacttggacctggcctttgggcacaaaggccactgctctttctccatccctcttgactgctcaggtgagtggctgctcttactgaacaatatcagtgggcagaggatgggagaagtcatggttttccccaggacagaaactagggctggggcttctctgctcagaggccttgttgttactaggcaaaaggggttcactgactgatgcactggaaaccaatactataacaccagggttttgagaaaagaaaagcttttctattgcaatttaaccagcaaggacacaggagtccagctcaaattcgtctctctgtgctggctttgaggcagtcattttctatcaaaatagaattactgccttagaaaggacgccctcccaaggacccactttactgtgttttgcttttccttacaaccctgatcaccaccgatggagtgtgttcctcacctgtcttcttcaacacagcccactgaggcgggtttagggggtggattctgggattagaaggtgattggtggaaggaaaggagagggctggaagtctgtgggcatgcgcagttaccccttcatgccgcctcatgggttccatatacaaattcgaggagagttagcgtgaaacgtgcggtggaaattcatgctgtgacatcagcaagctcattctgtgcaaactccaggtggccatatcggttccaaccgatttcagccaatttaatctcgcaagcacggggagtttctgccatcctgtaaactcaagaatttgtgttagttattggtttctttaactctttggggcacggtttcattccgtgacttcaacacagaggagtggggaggcaatcccattgatgcactctggaaagcctgttgtgggtgagccatggcacagggctggacggtccaggaccttggtcccatgacacatgaggtctgttctgcggagccccagcgtgtggccctgtccaggccccgccactgtgtgtgtggcgttttattgtcaagctgtccttctctatcaaggtcttcatttgcatttggccaggcactggcagctcccagaagacactgggatttttccaatttgtttgtttatttcatcaacaaaagctggattccagactgagatgttaagtcctggggatgctgcaaggggtaggacaaacacaggctcagccctccagagttttctggtctaacgtgggcaatacattcccagggtccatggtgggtaggggccatccactctggtggggaggagtgttttaccactgaattgtagccagttttattatgggctttaaactttctatagataatgcacccccttactgcttgcacctgggaagactgctcgccccacccctttgctctcttactgtacccctgaatgaaggactccaggaagtacacacgtggtcacttgctatttcccccaacatgggagacatagtcctgcctcagggcctttgccctggctgtgccctaggcctggagctctttcctcatctcgatgctcagctcactccttgatttccttcaggtctatacttgagcatcacttcccagacaactttacaaaaaggatcctctcccaaagatccactttactgtgtttttcttttccttacagacctgatcaccactgatggagtgtgtattgttccttgccagtctttctcaacacagcctactttgcagttttgttcattactgtgtctccagtgtctgtcccttgaaagaagctcaagacattttgaatggataaatgaacagaagagaatacctgtgtgtgaatcttgttcctgccctgtgccagctgtgtgaccttaggtgaattattgccccctctgagcttcagtttctttatttcaaaaccaccaagtggctgagaaaataaacccaggcaagagaagaaaacacctgccctgccaggggagctgatgaatatctccttcttccttctttctttctcccattaaatttgacagcctctgctttactgcagggagagagccaggagcctgtttaggcggtagtaggactcctttccattcactgcactcccagcctgatctcagaggctcatgtagtcagcagagcaagagaaatgggctgggaaacaggctggatttatttccttcctttccagcaaagtactctaaggatgtgcccatccataacctcgttgctcacatgaagaccgagtgacgactcagatggatggagatgtatgaacctctctgcacatgtgaaaatccaaccctaagccatgcaggggaaatgggcaccaaactcaagggcaggcacattccagagcatggggtctgcgggggatggcctcgcccaacccaggcatggctcacacaccatttatttctttactgagctggaaactcaaatccaaagttttcccgatggccccggaggaataaaagaattggggagagggaaaaggtggagaagaaggtgaaagaaatgaaggaaaagaaggaagtgaagaagaaaaataagagggaagaaaaaaatgagaaagaaagacacattttaaactagaataaagtatataccctttcttaattgactgaccatgaaccaaatcagagctttcaaagagaatctgaccaaattgttatttcagtttactttagagtgtgatttgatgtaaagaagtcagtctgtcttgccccactaagccttgtttaaatgaactgcaatgttctgtaagtttcttctggaaccttagcccacccatatgctacaaatatgtgttactagggtgatcagccatcccagttttcctgacactgaaaggagtccgtggatgcaggactttggtgctaaaactgagaaagttctgggtacacgaggacaaacttgtcaccctaatgacaatgtcatggcttgaactatggcccctagaaagatgtatctcagtccacatccctggaaggtgtgaaggtcaccctatttgaaagaagatctttgcagatgtgtttaagttaaggattttgagatgagattatcctgggttactcaggtaggtcctaaattcaatggcaagtgactatataaggaagaagagaagacacacacagacagaagggaaggccacatgaagagggatgcagagattggaatgatttggccatagccaagagatgcctgaagccaccagaagctggaaaaaaatagagaaggattctcctctagagccttccgacagaccataacccggctaacatcttgatttgggacttatggcctccagaactgtgagcacataagtgtatgttgttttaagccaccaactttgtggtgatttgttggaacagccctaggaaagcgatacaggcagtaaagaaataaaaggcaaggtggacatatctggaactctcaggatgctttctgatttgctctatctctagcaaagtttctagaatacatttctggagaagtagaagtagcatgcataattttctaaaattctaaacaccactcccaaaactttcatatttacttaactcctgtaggcaacgtggcatgtggtcctagcatcccagttccctgggagatggccctcctggccagggtggtgcctttctttagctcccaggtcctgccccctggataaaggctgtctgcatgtcatggtcctagagctgggggcagggagggcatttgcaaggagggaggcctgttagaactgtgagcacatctcagcacacagatgggcatctctattagtccattcttgcactgctataaagaaataccagagcctgggtaatttataaggaaaagaggtttaattggctcatggttctgcagctgaacaggaagcatggctgggaggcctcaggaaacttacaatcatgggggaaggtgaaggggaagcagacacatattacttggctggaggagaaggaagagtgtgtgggaaggtgctacacacttttaaacaaccagatctcatgagaactctttcacgagaacagcactagggggttgatgtaaaccattagaatccacccctatgatccaatcacctcccactagatcccacctccagcactggggatttcatttcaacatgagatttgggtggggacacagatcagggtatatcagtatcacatctgatgttggatgagcatcgcatagtatatcagcgtcacatctctgcttgacacccagcgggcactgtgttttcttagattctgtgtttgtcttttggcatccattaatcacagggccaaactaatgcccaaagttgtttatgtctcccctgcaatcagctttggagggtgtttgaaaatcatattacaaactctccaaccaagccagagcacaaccccccaacttcttccttatctaactcccacacaccaagccagtatttcgcctgcctcacatcacccgggaccagggacaagacaactaagacctctcctgtagcccagagcctgcaacattattcacatcagccaatctcaagctgtttcccctgccctaccctgccctaccctgctttccccttgagaaacacaataaaggttcctgcccagacttttctgtggctccttccactgactcctaggtgggctggtgtgcccctttctcttgggaaacgcaagtaaaatattcttttgatggcacctgcttctccctgctgtcactcagtcacttccataaattgaaatccattggatacaactgggacagttggcatcacaggtgactcaacatttgatagagctgcatgcccctgggctgctcttggcttactaactggcttcgccaacaatgagcacccctggctgtggacatacctgcactttagcgcctccactctatgctatgtctaccatgtgctgccatgatgttccaccctaaattgtaagaggacctcaaaggcacatgcctccatggtacacctcactttgtatagtttagtttttaggaaggctaaaaccatcatcttggatatgcaacaagatccactgggtctgtttgatacccaggcacccaggaaggagggagtgcattgattgaccagcatacaaggctcctctcaagggaacagggagaggattcttccagaaggactgtattgaatctgatccacatgcccatcaatgccaaagtcagtgtaaggctcattcagcctgacttgagttcttttctctgggtaagtgaattattgcactaacctgccctttgagagagcattcctggcaaaattctaggtgcagtatcctctggtaaaccatagggatgcaacaccaagtactcctctcatggaagccattggcatccaaaaattttcaaggacaaatctctgttgttgcttgccttgctgctgttgcaattcgtctcctaacttagcaggatataaaagatcccatccatggagacaagtggctaaatatttaatggaaaaaggaaagaaggagcatgttgttccactccccttaagacatctgaggacgttcctcagctcatgcaagattgtaaatctcctgaccaatgtgtccgggcactcctgagtgctgctacctaatcaacatgcgaacagcctccttcttaagagtaaattgtcacaaaatcaggatgtgacatcattgttctcttgaatgtggaccccagaccttctgaggttgattgggacaccctagagagggaggctgctgctcacagcagaggtcactcaggactaccaggaacttatcaggtaaacacccaaaggaaaaaaaatgtctggggaaagacaggagacataaaaggggggaaaagtgggagagggaaggattttaaccacttagagatacaagccattctaaaaagatttaagagaaaaaaaaaaaagccaggggtagaaaagagactgattagggtgggtacataatcagttgcaggggagtggctgctgctagaggtcctgtgtcacttccctcacccccttttctcttatcagccagagacaaaaataaaaaataaaaaaaaattaaaaagcagtttcaggtggtcaaaagcctaaaacaaaacaaaaataacaaataaacaaggataacccttagatacagagggaggaaaaaatgtcagatttcttttttctttttttttttttttgagatggagccatactctgttgcccatgctggagtgcagtggcgcaatcttggctcactgcaatctccgcctcctagattcaagcaattctcctgcctcggcttcccaagtagctgggattacaggtgtgcatcaccacacctggttaatttttgtatttttcgtaagagatggggtttcaccatgttggccaggccggtgtcgagctcccaatctcaggtgatccacctgcctcagcctcccaaagtgctgggcttacaggcatgagccactgcatcccacaaaatgtcagatttctatccctgtctgatcctctcccacctctgcttgctgcttctctagtgtggataaataggagatgcagtgctgcatctacataccacagcttccagctctgcagggagatactgttcattcagggacagtgtattaactaccctaccaggacactgactgtgaagtcactgtaaatggttactgttgtgtaaatgtgagaagaagctgggcattaatgtgctgggtgactctgaaccaggcccccacctttctgaacctgtttcccagatctgagtcttggcttggcttggtctagatacaaattcacatgttgttgttgttatttctattttcctttattttatcatattcatttatttaacacagcactctctcttcaaataaaactttagcaagggcccaggtataaagcaactgaagcagaacctctctgagtgggccctcattcttctgtccccgttgctggacactgcttaggacccctgagacagagatttataacagaaaaccaccctcaagagggtgtgtctccttgctttgcagttcagaatcacagtcatattgggtcactatttctgagtgtatatttttaaagatcagatcacagctgagtgatctgaagggtaatcactccctggcttaaacctttcacctatgttcctttgcttattttgttaacttcagacccttcctcccatgaggccctgtacctctataggagcactcaggcacaccagaagacccctctcctcctcttctgtgtcctagcctggttgcctcctttctcttccttgactgaaccagatacttccctgcttcaaggtcttttccctgattatacccacttcctgaaacgctctcttggagcaaattctttggctgtctctttctacagtgtcagcttaaatgtcccctcctcagagaagccttccttgacccccagtttgaagtggccactcctattcccacttcagctcaccttttgtctcatttcaataacagcatatgttgaacctatgcatttgtttgtttatttatctatttactggtctgtttatggtctcctctaccaaaatggtcataccatgaaggcaggaaccatgaatggctgcctcattaaattccatatccccagcacctacaacaatgcctaacatctgagggctcaaaaactgtgttgaataactaagagaattaattaattaataaatgaatgaatgcactctgggtttgagaagaggatttttttttttaactactgcccttggtatctgtgaagcacaatttgaaagctcagtaatttgtcagttgtcacaaacccaactcagtggtagtaattcttacattcatgtatattaacaataagtacttattcctacattcaggtccataggtcaagcacgacttggcggatccaggctgggctctgctgggcatggctgcaggctgtgggttgggatcaggtctgctccatatgtgtttatcttgggcatagtctaaagggagagcagctcctctctggacacactcctcatggtggatccctggggacaagagcaagcaagcttcatgagcacatttaatgactttagtctcgtcacttcctctgacactctgaccatccttggtcaaagcaagtcacacagccaaacccacatcaatggaccaggaaggcccattatctgctgaacaataactcaaactatcactaaacttatgaccacgaacagtgattcaagaaaccaaagtttaatgcaggattgtttgtgatctaagaggctgtctgaacagggatggctgagattattagagagagaaagagagagagagagagaaattcttgtatctgaattactctgaaggaaaggctctgctgctggcagttaatgcaaacacacccacagccactgccagaagcctccagtctcaatgtgatgacatagtgagcaaaggagcctgggggtttctagcccaattcagtgctgggaagcaagagctcactcactctcccatccccctttcccactacccacccctcccctcctgccagcaaatggaggcagcacattttcactccaatttccacttaaagctgcagctgctgtcgccgcctgggaacccctatctttttacatgttattgtggatcagttgcccgctgctgcaataaagaactctcagtgggttgcctggaatttctaactcagtgccacagaaaacctggtggataaggaaacaagaggctgcgcttcagtggtggtaagtgctagacttaagcaggcaaccctgggtcctagcctcttctggtcagtcctctcccagacatcagctccaggagggaatctgcttcctcagccatgagggcaatgaggaccctcaccatagctatctatatgggatcctccagcatcctttagcctcgatggcaaaacactcactggctgttttcagtaagttttagattcccaatattgttcttgcaatcgtggggtggaggacagaagggtggatggtcaggtattagatcgatcaaatcaaattgcagtactcagaccctgggggtacacaatgactttctaagggttcacaggcaacaggccattttgagagaatcacttttcagattctcaactgacatgggtactctgtgggctcttcatttccacatcctcttttggtaacactcttctcccactttataaaacaaagattgatcagtcaatgttctggcaggagacagatagcgtacttacattggctaattggaggaaagtttcataaaggtattatttaaaacttgtgatccggatgaagggaaatagcaaacaatagtgccaggccctggctagtaacagtggggccctggggagggtgaggggaaagagccttctggaatctgcagacaaaaggagactctaggcgggggctgtcagacaggagctgtgaccttctgcagtggaggcaggcagcctgggctcccccacagtagggataaagaacccctacctcactcatctctcagtctaccatctctgcctgttctcgctatcccatggcaaaacccaactgttacaggaaaggggtcccggtccagaccccaagagagggttcttggatcttgcacaagaaagaattcagggtgagtccatacagtgaagtgaaagcaagtttattaggaaagtaaaggaataaaagaacggctacttcatagagcaaacctgagggtggctggctgcccatttttagggttatttcttggtgatatgctaaacaaggggtggattattcatgcctcccctttttagaccatacagggtaacctcctgacattgccatggcatttgtaaaccatccttgtgctgatgggagtgtagcagtgaggatgaccagaggtcactctcatggccatcttggttttggtgggttttggcagccttctttactgcaacctgttttatcagcaaggtctttatagacttgtagatacaggccaacttcctctctcatcttgtgacttagaatgcctaattgtctgggaatgcagcccagtaggtcttagccttattttacccagcccctactcaagatggagttgctctggttcacacgcctctgacacaaccacaagccagaaagcaagggagctcattttgatggaaggcattcaaacaattgcataacatgtaacagaagctctttaatctccatctgtttatttacgtgaacaagattcaccctgcttacagcaacaaaatcaaaattttttcaaaagggggataatgttgaggccgaaacctgtctccttatgatagtaagcaacagtcatccacgaatacatgaattaattgagaaaacagccccacggctgttatgtttctctgatcaatggtgcactactcactatcgttaatgataactaaattcagaatcacatgtttaacatttaaagctttacaggaacagaactctggatattatccgtttttaatttatacatgtttttgttgcagtatgatcaatacaagacttccaagcataaaagtaagatacactcccatcaaagttggctagaggagtagaagttctaggagaaaaaggcaaaatttccaacaattagagctgagttttcatgcatttttaaaatcaatcgtggtgggtatcaatcattatggtattgagtttccactagacacacgttaaaattgatgtaatagtcttcttttagaatataaatattcagtatttctgatacaatgatttaaacttatgattaaaaaataaggtgttaaaaatgtgagaaggtacatggatttttaaatggaggagaaaatggaagggatgagtgtggaaaacctagtaggggcagatatttacatgggcttcacttgctgttcatgtggctgggacgtcaagggatgaaataagataagattctagaaggtgtcctcgacagccctcatcgagtgcctgatgacaaggtagtaatgtgccgttcgaagagaaaattgctgggtggtcagaataggcctcctagagccaactggagatccagggctgggcaggcacagaggtggatttgaatatgtcgggaggaagctgcctggacctttagaaagaggaaattcacaaagccctaagaggctctcattttcaacaacaacaacaacaacaaaaacaataataacattgttgtgattcaatacttattgaatactattactttccagggactgggataagcagtatatattgatgtctacattggtatctcactcaacctaatccttaaagagagaatctctatcatgatggttatcatcaccaacttatagatgaggaaactggttgccttgcccagatcactcaccagctgctgaatggtagagctagaatttcaacagtaatcctcagtcctccaattccagcaccatcctttagtcaccgcaccgtattacttgcctctcttttgtttggttggttgatcacttatatagtcatccaatctttcttttgtggccacaggtgtgtgaaccagagcgactccatcttgaatagcaactccatcttgaataggggctgggtaaaatgaggctgagacctgctgggctgtattcccaggaggccaggcattcttagtcacaggatgtttactgttaagggaacagaaacagacccagaacttaacagatgcaggaaatgttttgacatcctgatatcttaagaacaaaagcagtcctactttaagaataagtcttgctttaaaaatagtaatatagactcttgggaaggacagtagttacacaacgattagcaatcctttatcacaaacccctgtagtggagcatatcttccccatgatgtttgttatcttatatctaatcaagccttgcacctaaggtgggggcattccacctctttcaggaatgtcctgctctgtctctggtacagccactctttcattcctttacttccttaataaacttgctttcactctactctgtggactcaccccaaattctttcttgtgcgagatccaagaaccctctcttggggtctggattggaacccctttctgataacaataaggcaaataatcgttgagcacagactgtgtgctgggcactttgcaagatagctttgtcgatacatcttaatgttggagagtcctcatccgtacttatttccttgtggaagcctgctttaatgctgttaaattctttccttctgtcttgggaaggaaggcaacacgcctttcagagccttggaagatgagcctttttctctttgcttttctttccctcattctccaacttcagggcccagctcccaagcccagtctaccccggccagtccctgagtgtctgcccccactcagaacccttttccacatcactcagtctccagcccatggagctctggccaatcagcacccacgtggagacgtctttctaatcagacttttcagtgcagctacacattaacctcaagtctctcttcctctgctcaaagattctagctcagtgctgagcaaaatggtctctgtgttcattgagattacattctgctgtgagtttccaaataggaaaaaatgacagtattatattaatatcttaaacaggataaaaatatatttctatgttctataaatgtggacagtccagggctggtacagtggctcctgtgatgtcgaggatcaggccccttctagcttgctctgcaatgccctgcaatgccctgcatgaggcttctcactcatagttcaaggtgtctgctccagatctgtcacccaagtccatgggccagccagcagatggagggaggggatgctctgtctctttaaaatacttagaatttgaacacagcacctaggtttatattccactaactagaagttggtaatctggtcacaaatacctacaaagtcagctaaaatgtgttctcagtggctagataaaggtctaggattctatgactatagacaaaagagatgaagagataatggatttttttttttttttttgagacagggtcttactctgtcacccaggctggagtgcagtggtatgaagatgactcactacagcctctaccttccaggctcaagcaatcctcctgcctcagcctcctgaatagctgggactgcaggtgtgcgctaccacgtctgcctaatttaatttttggagagacagcatctcaccatttgcccaggctggtctcgaactcctgggctcaagcaacctttccgccttggcctcccaaagggctgggattacaggtgtgagccacagtgaccagccaagagattttcagggacaatcagtagggtccaccagagcagccaatgcattctgttcactttaccctgacattgtcctctacccctagccctctggtctcacttcccatgggtttcagggaccagagcacagagtctctctgtgagcagccctcctccctatccctcaggaaaatcctatcttggtagttactaatatcaatatcaagtattatacagagacttgttctcttccaacttgtaacatttagaattggtgagaacatggtcacagatgggttcttcattgatttataatcaaattctcttattgtcaagcaaaaatgactgttttctgctcagtctgtcagttgctgcagggaagtgataaggaaaggctcttctgtgtcagtcacctaagtggtggctacgcagtgcccaccacctgtttagacgaggaagagatgagcacctgtctcagggtcctctgtcgagagggtccactctagctatttaagcagaaaaggaatttaggaaatggcactggggaggtcacagactctccagaagagacagcaaatcaggattcttgaagtctgtgcagctgggaataatgtcggaacgacaccatggaacccaccctagagaccacagatgtgtgctgccacactcaactaacttttaaattatttaaaattttttgtagagatgaggtcttgccatgttgcccaggctggtctcaaactcctgggatcaagagatcccgccttggcctccaaagtgccagaatctcagtctcttctaactctagaattctatgacctctaggaccagcatgtggagacctggaaaagatagatttagaagctggcaaaagagccaactctctgatttcctcttgcgttcagatttcatccaaccatccatcccccaggagacgctcatcagtccttgaagaatgcacctcctgattacaatcagatattttccaagtgccagctggagattaactgatgggaagtctcaggtcatagaggatattgggccacatctgtcactccatggggaattgtcatttctgctcagtactgaggagctacgacctggggacagaaaaaccggaggaattgcaaatttaaaacacacacagggagcctaactggtggtatctgaattagagcacattttgtccctatagtccaagttggaggcactgatgagcagcccaattttgtaagggtctcaaatatttacttaaagaatagtatagtataaatacctgcattaaatccaattgctgtcactattaaaaatgtcatacgattgtttatttctactgcttgctcagaaagcaacccatgcttgacaaaggcctgctatttataagaaggtgcacagaaatgaacagtattaaatttggtgcctgtttattcctccaagctacccatacaccctgctttacactgaaatgctttctccatgtttatccacattgtttctttccaagtaaaacttattacacagattcctcggggtattttttttcttttcttgattctggttaaataaactattgattttgttttcaaggtaacttaagggggagtaatacagttctaatttgataagtacaattgtaatgcattcaaagtaaacacactttaggggttcaactaggacttattttaaaaagaaagcaaatcaatcaatgattggctactatggcgattttagggtgggctggatggggatgaaactgcattggacattaatactgcagagacaaattatcaaaaggaaaattgacattagaggccatggaaagctcttccaaagacatgtacccttcaaggatgaattaacactgggtttcttcgggagcacggaagtaaactgcaatttttgagaagctaaaagaattttttctagatggaccaggaaagtctgcaagagtatttgcagggtggccagtctacttttccactctaagacaatgaacatcagtcttcaaagaggcacattctagctaccaggatacacttggttgtaggtggccagaaacccaagtccacctggcttcagataaggaaaagaatctatggcctcctgccaaggaaaagccagtgatagagctggccttgggcacatccaattccagagggtaaaaccttgttatcacatttctatctgtctcagagtgactttgctggattgaaattgcactgagacagatgccatcccctggtggctcagaagcctcagttttacacctcccaccctgtcccccagcagaggtccaggatgaggtctgattggctctgactcggtcacgtgccattcctgaaccaatcattgtgggcagagtcatgtgaaacctcattggccaagcctgagtcacatgatcaccctggcacagaccggagaccagcaaagctgtgttttctagagcaagctcaagagtgtggcttcagaagcatgggggtgaatgctgggtgtgttagtccgtttttgcattgctgtaaataaatacctgaggctgggtaatttttaaggaaaagaagcttaattcactcgtggcgctgcaggccgtacagaaagtgtgttgccagcatctgcctctcacgaggcctcaggaagcttccaatcataggggaaggtgaaagggagccggggcattacatggtgagagaaggagcaaggtgcgggggacgtgccatattcttgtaaacaatccattctcagagcaagaactcgctcattaccaaggggatggcgctcagcccttggcaagatatccacccccatgatccagtcacctcccacctggccccacctccaacattggaggtcacatttcaacatgagatttgaaggggacaaacatccaaaccatatcactccgcaggtacaaggcacctgtccactcacgcccatccgggcatgtcatcatccagagtcaacccgaagtccttgagccctttgactctactgacctttgggtgcctggatcgcagtagtcccgacctctgcccccaccaccacaaatgcaggctgctctcagagcctctgctaccagaacttggcttctgcccacatccctccctttctccacacttcagctccgacacctgtcccacgtgccctctactgacctcaactcattctgctttcctctctcatgtactaactggggttccagctgtgtcaccattcaagcatctgagctccctgacccatgtgttgtctctgacatcagccagccgagggccagctagcacgtgggcgagaactgcctgccaagaacagccctgctcccttgaccacatcaggaaataccgaacatgaacccattgtttgctctgtgaattgtgcctctggactcaggctaaatgcagtaaaactgtatgtcagtcaggtttcgtggaaacagaaggaaagaggtactttgcatgtatatttattgtattacgttatactacagatgctcttcaatttacaatgaggttacatcctgattaacccatcataaagttgaaaatatcattaaattaaaaatgtatttaatacacctaacctaccaaacatcgtagcttagcctagcctaccttacatgtgctgagaacacttacatttgcctatagttgggcaaaatcagcgaacacaaagcctattttgttaaaaagtgttgaatatttcatgtaatttattgaatttattgaagtgaaaaacggaatggttgtacggctactcaaaatgcagtttctgctcaatgcatatcactttcatactatcataaagttgaaaaattgtaagtcaaactatcataagttggagaccatctgtacattgaatatgtgcatatatatgaatatgtatgtgtgtatatatacacatatgccctaaaattatagaatacagcaaagagtattctttctactagtattgaagattcagccacgtatagattacaggacagaaccacagtatgagatcactcttaaacatacacaaagatttatttatggatttatttatggatcactcttaaacatacacaaagatttatttatcatcttcctccttctcatcatagctaatattattgagcacctttctaagccctttacatttttaatgtcatttacttcttttatcaatcctctgaaataagtgccacatttctcttcttgatttacacatgaggaaactgaggcacaaagaaattcagtgactttcccaaaatcatgtggctggtaagcgatggagtcaggtgcatggtaagattgacattttttcaccttgtgaagttgggggtggtcatgtgatctgttctagccaatggaatgtgatgggaagtgtgtatgttgcctggggaagatgccattaccatccagtactgtaaatgttttgcattcttaccttgctgacacatcctagatagcggaggagctgccatcacaggcatatgagtgaaagtgttgtggagtagacatccccactgtcctgagatggatatggatttgaacaataaataatccttgtttcttgaagctactgaaattacggcttttcccttttatgttactgcagaataacaccagatttcaaagaggacttgagcctcatgcaaatgttttcattatttttaataagggaaatgtattcatgtgtcatttgtgtcattaaagtggcacttcataaaaaggaacctaaggtgttataatggcagtagaattaatccttagcctctgtccctaatgtcttactccattttatgttgctgtaaaggaatacctaaggctgggcaatttattaacaacaacaacaacaaataaaacatttatgtggctcccaattctgctgtctggaaaagttcaagactgggtatctaatgagggcctcaggcagcttccactcacgggggcaagtgaaggagaactggcatgtgcagagatccacagtgggagaggaagcaaggcggaggggagtgtcagaccccttttagcaaccaactatatggggaactaatagagggagaacctactgtcctccccagggagggaattaatctattaatgagggacccacccccatgacctaagcacctcccattaggccccacgttcaacactgaggatcaaatttcaacataaggtttggaggggacaaatatctaaaccatagcaactaataaattaagacattccacatatctgtgtgttctcaatggttaatgattaatcattaaaacctcactctgtatttaaagaattgtggctgtaaaactttctaaaaggttacaccagtgttcattgctctattcttttaagccttctagtattttttaaggtaagatattcagctatgtcttcttaaagtgtaatttaacttctccactgttgatgttaaagaaaatgatcttttatgatcaaaagcttctatagcagctgctctgtgccaggcatgttgtgaatgctttacatatattaactcttttaaacctgacaatagccctttcagtcaggtattattattgcctatcccaaagttagtgagttaaagagcctgactttggtcctaggcagtctagttcagcgtcctcacctttaatgaccatgttactctgtctatctacaccccagggatcaagaacagtgtttgctccaaaatagttcactaatgattattatttgagttaatgagcaagtgaatgaatgaactgcacttcccaaagtcttttcatttacattatttcatttaaatgttgcagcaacccattgttcattgactgtgtggctagtatccccaggttaccaacgagaaaactgagtcctggcaaggtggaaggtcaagttaccccactgggaggtagcagagctgggcctcaaatacaaagcattttaactgctagttcattgctctttccacttctatataattaaggagactgactgagtgcagaccataagtcattgacattatttttaatcagttgggagattccagataaaccattcagatttctgatttgtctttaaagaagaaggaggagatttggctgcacggggcatcattcccacaggcagccatctgtcccctggagctgccacctcatggcctgcaagggttcatccacccccacagcagtcttcagagaggagaaattatcaggctctctttactaaagagaaaactgaggtctggtcctaatgctagaggcagtggggtcagctccagagccatcccttaaatgtcacctgtgctgaggctgagactggggcctgcagcatggacaggggaaggcacaaaacaggcctcagagtgaggagtgtttcctttcgactgaggttcctgagaatggagagaaatattttcccttttaaaggagatctgtgcccgccctaattctccagcttgccaggaaaaaaagtgcagctgctgttccaggcctcagaacaaatgaaagcaaagaaaagggtttctttcttcccttgcaggggacagatgaccttgctgcttcctctgagatgacacccacgtggaggtctgcattggttctgtatttccctgctctctcttgttgcttgaggaaagttctgagccgtctctgccataataaggcatagaggaggcctcaaatagcctgtcccgggcccctggctgcttcaggaaggacacattccttctagaagagcatcctcttggccagagttgctaagagccggcattcagaccttgacccttacgacacagagagtgcgcagagggcacagctttcctgcctgcttcctgaacaatttctatttgcctctgcacacagcattctgcagtggggtttagcaaggagagcagctgggagcttccttctttctttcattcttccctccctccctctttccttcctttatccacaatgtccaatacacatattcactaagtaattcctatgtactagacacaggggttaaagcagaacctaaatagagcctgccagccctcatgcctggtgccacactccatggggtagacaacataaacaagttaacaaatagcacactgccacctggggctaatggttttgaaagaaaaacagtaacagcgattgtggtagaattatggtgagttctttctgaaaggcattggagaaggtttctctgagctcccttccccctcaccccccgaatacacacacagatggtgagaaggagagagccaggtcaagacctaggggaagaacatttcaggcagaagaaactgcttgtgcaaaggccctggggtaggagtttgctttgcctgtgcaatgaatggcatgaggcccagtgcctagagggaggtgggaggggtggagaggtgccttgctgttgacaccgccaccctcggggcttaagctgcattggaggctccttctcctccgtcctccttcctttccctgtcctctcttttgggtcttctttgggcctcccggcctgtcttcatctctgtgattctctcccactctcactgtgtctgtgtgcatcaccctctctctctcagcagcacagagaaacatactcaagggtcaagggaacgcctaaggcactaataggaattactgaaggccgggcacggcggcccacaacactgtaatcccaacactttgggaggccgaggcgggcagatcacttgaggtcaggagttcgagaccagcctggctaacatggtgaaaccccctctctcctaaaaatacaaaaattagctggtgtggtggtgcacgcctgtaatcacaactactcgggaagctgaggcaggagaatcacttgaacccaggaggcggagattgcagtgagccgagatcaaaccactgcactccagcctgagtgacagagcaagattctgtctaaaacaaacaaacaaacaaagaacaaacaaggaattactgaagtcccacaatctatccattcaatcacctattcattcacaaacattgctgaagtccctaacctgtgccaatccctgggaatataaagctagtctgtcttctcaggaagctagcaggctacaggggagatacatgtgcagataaaactttaagcaccatttgaccagagccccgaagagcaaaatgaaagagcccaagggagtcctcggagggagtcctgaactctgccaggaaggtcaggggcgtctgcacagcggtggtgacatttgacctggggtggagtgcggtggtgacagcgtgggtgagaggtgaggtggcttccattcaaaggggacccaggtgagtaaccagtgagtgcatcactctgtgactcagtttccacatctgtaaaatgggagataccaagctcagagcacccatgccctggaattgctgtgaaagttatgagttaggtcacatggtgcccacatcagtacttggcacatagtaagtgctccacaaatatttgttgcatgaggaagcacacaaatggatgagttgaaagcacctttccatgtttgtactacgggtgagaccagaacagaacaaaattggtgttttccctccttaacaatctccaaatatggatcattcctctgatctgctccacttcctttgttttggacagtcagtggaattccagcagctggcatgatgggaggcaagtttgattttgttttagccaaaggcaacacagggcagaattgagcatgcagcttctggggcaggctctgccacctcccaactatgtgacttgggagaaaatactcacgtgcctgcctcatttgtcccaaatgggaatagtcacagggtgaagatttaagtaagtgtaaggaaggtgttgcagattcacagggtgagtgtgctatagtgtggctggtggaataatggccccccaaaggtgtcacgtcctaatttccagaacctatgactctgttaccttatgtgagaaggaggaattaaagttgctaatccactgaccttgggaatggggagatgtccctggattatccgggtgggtccaatgtcatcatggggtccttaaaggtgaatgagggaggcaggggactctgagtcagagatgtaaagatggaagcaaggtgacaatgtcacaacggcggagctcaaccttccactgctgtccttgaagacagaggaggggccgggagtcgggaaatgttggcatcctctagaagccagaagaggcaaagaaacgaattctcccctgcagcctctgcagaggaggacagtcctggaaacatcttgattttagcccttttgagcttctgacctgcagaactgcaagagacaaatgaaagttactctagctgctctttgagtaatttgttacaggggcaataggaaatgtacaaccaaccattgcatccacttcacgacccacagggatttctgtcttttccgccactgatttgccgtcgcctagaacaaacactgcctgcagcttggtacctgctgggtacacatttgttcaaatagtgcatagatgaagtctaggtcagtctatgcatttcatccccgggccatcttgtttggtttggagggtgcgtgtgatctattcctccctgtttaagaggatatttggggattattgctggaaaagttagggcaaaggagctctccctgtggatggggtgcctggtggctctgaggactgggacagtggcagtcactggtgccaccctgatggggaccagcagggagagaagcatgaatagtgggggtgagtgacttgtttggcagagcagagagaaaaaagggctgaaaatgcccaggatttgaaacccaggaaaatatcgaactgtctgctgatcgagtagcaaggaggaagagctgggtttagcgtaaatgaaagattgactctgaaagctgaagactttggaaaccctgtgtttcccaagcaagattctggaccatcagcataccagccgggaaaacacaggaggaaaccagcggggaaaacgcaggctggctttctggccacagtcattctgtctgcacaacccctcggtatggaatgagaggaacaccaactcaccccgtgcataggactttacattttgcaaagcatttaaagatatttttaaaatgtacttctcaagacaactcttattaacagcatctacctgggacagatgaggaaactggggctcagggagttcgtttatttagcagacatttattgagcccctactttgggcatgttcttggctccagggatacagcagagaacagagcaggtgaagagaaggcctgccttggtcaagtggttacactaataggggagacagataatctgtgtgaatgaaaggtgcggttgctcaagtcatttggctggaagagttaggaccgagattcccaggtcagctggttcagtggctttggtctcactccagatggtagcagagatgcttgggcgagggacagcctcctccaaggtaccccagacctgcctctgtggtcacagattggcccagagattcactcccatcctggcactgccctacttaggagaaaaaagaataaaccaaatactgttgatttcttttgataaaaagttttgatcctctattgatggctctggaattttcatacaagagatggtaatttggttggaagaggatttcaaagaagcttttattgtttataagtgttctctcccttccaggaagaaagggatatcacttcccctttgttttgtgaaactggggagggtggcgtgtggggctcgttctatacaattggatggaggaggcatcgtgtgttactccagacctacgtgtttcttggcaggtgtgcaaactccaggccgtctaccctgcactgtgatggtggagatcggtgcttcaaggttaacagagcaagatgaaaacctccaggatggctgagtccacgcgggtatgctgcctgcaagggtgagctggaaaaaacaacaaaacataaataagcacgtaagttaatacacaaacaaattcttggtgtgattgccactgagatttggagacgattgctgttagagcgtaagcccagctttctatgttcaataaggggccatgatgataggcataggacacttatctcaaagctgcctcagcggagcattcacagtttctacttggcatgtatatttcagataaataaaaatggaacagtttcataatgcttattttttactttatgtatgtgttttcttagtgggacactaatggagattcagagaggggtggatgaacttccctttctaagccgtttcttggcactaacactagtgaagaatattaaaccaagaactcaggtgttcggggatttcttaaggggcaactcttattgcgacttaattaagaagctcagctgagaagcatgaggctattaaacagaggttgacggagccctagttgattcagggctgcatagagacacagcctttattagtcttctttgcttctatgaaagcaaagtaggtttgtgttccacttgggggctaatccattagtcgctgcaaaatctcagaggacaggcaggtccatttcaaacctcatttgcagtgagcttttcattttagtggttttggaaaggaattcatatgcctaaaccctagagtgtttggttacctcatgcaaatatttaatacccacagcaaaatttcagtataacaccaacaatttgttttccttgatatcagcctcatttgtcaaagctattgacccaggcccgtaaagaaatgccactcttggcccctttgtaatggttttatgcaaattgctttcaagatttaattctgtggaaatgtttaggaagaaaaaagataggaagagaagctagaccaaaactgaatatgaatagaaggatggaggggaaggaaggggcagaggagcagaggtggggtcctggagagaagggagacagaagaggagggacaggtaagagtgtcctgacatgttaaactggactttctctgcaacatggagagggttgggagcttagggaagaagatcaactcctatcccgtacacttgataaataagacactgactttgaaagtaccaaatgcaactcacattattttggctctgtctgtatctttgctctattcctatttgagcaaagacagagagaagccagaacaataatttcatgagtggggcaaagatggcccaacagaggaaggtcacctgaggacccacaacactttccaaggggcagaggggcaaggatggctcatacacttccaactactctcatcccctaaactgatctgcagagagcatgcttgctgggtggtcaacacgcctattgtcttctcccgtcacctttttccgattctcctcctcccattttgccaaagagagcgtagtttcccacccatccctcgaggtgctccgcctcgagggtatcaaacaaagggatgactcagaaccttgggatctggggccagggctcctttaagcaaaattccacgatgctcaccattcagctgttggagagatgcattttcaatatcaaattcttttcattttgaaagatcatcacgcgtcactttttatttatattgttttcatcaagtgggtactgttgataattccaataacttaattcaaaataaatttttaaacccttaaagatttatattcacagtactctttaaaattacatgtgtgtgtgtatgtgtgtgtgtgtgtgtgtgtgtgtgtgtgtgtgtgtatgtagtcatctctctgtatctgcagattcaaccgaggatcaaaaatattcaaaaatgaattgtgtctgtattgaacatgcacagacatttttattgacattattccttaaacagcattgcataacaactatttacatagcatttacattgtattaggtattataagtcatctagagatgatttaaaatatacaggaggatgtgtgtaggttatatgcaaaatctacaccattttgtatcagagatttgagcactcatggattttggtatccaagcgaggtcctggaaccaatcccccatggatactgagggacaactgcatatacacacacacacacacacacacacacacactctctctctctctctctctctctgtctctctctccctgtctcatatatattcagagaccacaggagcagaagagcattcaccagctatgtttgactttagcatccaggccttccaaccgtgcagacactctttccatgtgcggttggactccagctccagggaccactgggaactctctgtgaacagttctgtggtctacattacatctcacataaaatgcagcgatttcacaggctgcagccccaccaaaacagtctcataaatggttttttaagcttccattcagcatataatgcggtctcatccatttcattaatcttggttacattcacattttacagttttgtttttctggctaagaccattgaattttttttttttttttttttttttttttttttttttttttttagatttctccatttctaatacggaaatttggatttctgctcagagatcatcgttcaccaagaatctgaatttttaatcaatttcttatctatttgaacacaacatggatgagagacatgtccaaacctttctgggttgcaaatactgagtgggaggccagccttcatcaccaggcgagaggtcttgttccacccccgagcttgaccgcatgggaatcaaattcatgactcagccaagcttggcatggctgcatgtgatggggtatggtggccatcagtgctatttgctaaatatgtaagggcttccttcctgccttttggtagaattgcacttccctgccaccttgccgtttggtgcagtcatgtgactggtgttgtctaagacatgtgagtggaagcagcgtgtatcatttttgagccaatgttcattaaaccactttagcttccacctgtcatggtgattttctagaaatgtgtcaagatgaaggctggggccctgagcaaatacaatgtgcagacaccactgtattcacagaagggaaacatagcatttgagagaattagctgtttcttattttaagctgctgagatttggggatcttttaactgcccataagccatcccaattaacacacagagtcatttacaaatcattaaagcctctgatgttaaatctgtgaattgaaatgttctacaatgtgcaaatcactttggtaacttttttttttttcatctagaaaaactcagtccttcgtcagctctgaattgtggtggtaaactcctgggttctatctgaagtcaaataccaaggagaaggtgcaagcttcgccttctggaataaattcagtgaactgccaagcttccattctctctccttggtacttgacttcagacaggacccgggagtttaccaccacgatgtttcctgctgcctgctgtagccctctgagccctgggtctgtgctcactatgctgatcctggcgaccatgacctcagtgacatttctcaaaaatcccattttctgctttgacctagggtcagagacacactcaataagcaagcctggtgtccatcaaacgttgctttaaataagaacataaacttaaaggtctttacaagagaaatggcatgtgcagctaatggagaccagagaaagagttattagtccaggaaatcaggaaaactgattagcaagacgaaaggacatggcctgaaatccaactaagcagtgacagatgcagatattattctgcaggtgttagttcatcctgcttaaatagcaaggcctgaaggctggtgggatccttcactcctttacgttgacaacaacaacaaaaaaacaccaaaactcaaatttagataatcatcaattgcagaacaattaaaaattatctttgtaaccagaaaactatttttctctccctgcatgtaattgtctgccctttgtctgaggccttaacagatcagaggtcaagcattcttaagctttgagtggaaccagagcactcaatccagcatcaaagtcctgaatgaggtcggctcctcctggaaaatttttgaaagtacacgtcatcgcattccgatgattctggccttaaattttccttccatttcttagctgaaggcctaattgaaaacagccaaagctagttgggtgctctgtcttaaaggtaaagaaggacaccttcaggagaaaggagggaagagagctgatagcttgatgactcttcttgctgaaccagctgaatctaaggactgagtagtaaccggccacacagtataattttagggaccctctaagtaccactggactgctgtgtgccttcaatactaccattattgctcctttcaggtgaaggcactgaatactccttttaaagtaaaaacatcatataattggaagatttaatcagtcagcactcttggttgcatgcaacagaaaacgagttaaatagctttaaatgaaagaattttattacatcaggtgactaaaatgtgccaggaatgccttgttcgttgcaggcacagctggatctagaggctgcaatgatgtcatcaggtccggacgagtgtctcctggcctcttggctcttctttttccctctcaggaccattcttagagagtatctcctgtcatggctgaggacagattcagcccggcagaaaagagcctctgctgctctcagaagccacaataaaaggcctgttgcatctcattggccccaagtgtgtcacatgcacccaggcactggaacattcatggcagctttgtttgtctgtgatcatgaaaaacacagagccagcccggatgtccaccagctggagctcatggcgtggagtactctacagaggttaaaataaactggaaaagtggtcatacatgaaaatgcagtgaaagtgaaatacacgagcatagtaaacctaaagttcaggtgtgattctcagagggagggaggcaaacatgatggtggagagttacactagaagcttccactgtgcttgtaaagtttgatatcctttgtgaaatggtttgttgcagaatagttttctatgcacctaaaatgcttttgaaaattcaagccacaaatacccaacccacactcagcgtatcatctttgccctgaaatgatgtctgtcccacgtgagtctgtgcatcttgttagataacctcagaaacatgagaacactcgactcgttctccttagcagcaggctcctgctagctccgttctcctggatccctttggatttgtcttgctgggttgttggggagtggagacgccctcctccctgaagcgtttcctcacatggtgatttgtctattgtgcatcagtcaggatcccgggaggacctgcaggtgcagccacctccccacagggacagaaccagatccagctgccgagaaccaggagacccaatgtcaggtgcaattctgtgctgggatctgagtggaaccacaggtctgtgcagcaggaggtgagaagctcatgactacagagagaggcatggctggggacccagtgcctctgccccatctccatctctgcacctcggggcagcagaacactccaggcctctctcacagtgaccagcatggagcaaggctgcccatctccccaccagcctgccctgagtatgaaactccagcattggagattccttcctttttggttttccttctttcccttttataactgagcaacttctaggcaggatggctgaatgagccataccagtccaccttcagcaggggcttctggctggctgatggaggcatgtctctggggaacagcagagctcagggtagggacagaacagggagagctgggaggaaggagaaaggccctgcagcagacgctgcagaagctttccatcctccttgccttaacctggggctcacccaagtctatactcgtggtgagggcagggggaaaattgctttttcttaaagtcagtcattgatgacacctcctatcactgagtattcttggggcaggcctgccccaaccagctagaccaatggttcctacggaatttttaaggtggacagaaggttcctctggggacgttagtcagagctgggtgtctaatggagccctcaccgccagttcagccagagcagcttgtttttgatctgtttgacaaatagaacttttccataaggttccatttgaatgaagtcttcacacctaaacatttgagaatggctgcttcagtctaagctgggatcatctggtttcaaaaccgtcaaagaaatttcagcaggaaaatttggtcaaatagtattgccctgggcaggcttgtatgcccacccactttagccatgggcattagttatctattgctagatagcaagcaaccccacattttagtggctcaaagaaacatgtatttgtcatctagcagtttcgtggttcaggaaactggatgtggcttggctgagttctctagctctcaaggctgcaaacagtatcagctggggctgtggtttcatcctaagactcacctggggctggaggacctgcttttgaacttattcaagtggtctttggcaggatttagttcctcaagacagcggacctgaggcctttggttctttgtggctgttggctggaggcctcccttgattctcaccccatggggagctcagcacttggcatctggctcccccagagcaagccggtgatggggagaataagacattacatcagtcttttttctaccctaatttcgaaagtagcaccccatcatttttcccatattctatttgtttgaagcaagtccctaggtctagcccacattcaacgagaagggatcacacaagggcacagataccaggaagtggggaccattgggagccctttttaaaatctgctccccacactgtctctggctacattttagatagttgttagactaaactgtgaataattgacagactgcaatttcttctatttccctattttagaggtatctctctcctggaaacagcccttgttcacaccagaggtgtgaacagaaattcttttgctttgctggcctcaaactgatagaaaaatgtatcagttcaggcaaagtgttcctcactggtttgctgaattatgtctcttctttttatcccttaacttataattttatggactgtggaggaggatgggagaattggggttgggttttctattttctttttttccccttcttcagggagaaaaaaacttggctagagttgagtgcctcctaatccccagtaggaatctgacattttaattttgctttctcgccctctccagtctggcctgaggtgcaggtggggacctcccagcactgttatcataatcccaaacagccatgacagaagcctgcctgagggcttcaggggagactgaagagtcccaaatgcatctcttgtctaggatgatgaaaagttgattcgggcttgctaccaaatgttacttatcagatgccaagtggcattgtctatgcatggcgcctggtcctgccggggagctgattgagggtgagctccatccagagagcaggaggggtatctgggcactaagctaggtggatttaggacccccagcacagtttttggctgggaccattgtttggttctgacaaacagcagggcaccatggagacaggaaaataggcaaagaaaatgactcatctggctggaagcccagaaaatgtatgctaataccttcacgcagacaaaaataagattataaagagactggtggcaaaaaaaaaaaaaaaaagccagcctcaaatgatgcttctctttaatccatccacttagaagcccaacaagttgccgagatccaccgtgccaaagagagaaccatcatattagtgaagttgcttttcatgtcaattctttcctttctgtaactaaaactcaactatgggagacatactcagcagtcaccaacattctagattcccctcctcttcccatcccacaaaaggtttacaattccccatccttgaagttatgtatggacataagatcttgcttggccaaggaaatctgaggaagtgacatgtgttgtttcagtataattatttaaaagctggtatatgattctctatggtctcttgccatgccatggtgatcatgggagcatgtattgagatgcagatactgaaagatggtggagcttctgttcctttagatctctgagaagttaaaataaactgggcctccctaacaactcatgtgagatatatagagtgtgttttgttgttttaagccaaggggatttgggtactgttgtttgttgcaacattgccttgcttatcctcattagtaagtccaccatcctgcatcccaatatactttctgtagacacattaaaagcttaccacttcccggaaaggcacagtggctcgcgcctgtaatcccagcactttgggaggtcgaggcgggcagatcacctgaggccaggcgttctagactagcctggccaacatggtgaaacctgtctctactaaaaatacaaaaattagccaggcgtgttggtgcccgcctgtaatcccagctactcgggaggctgaggcaggagaattgcttgaacccggaaggcggaggttgcagtgagccgagatcacgccacggcactccagcctgggtgacagagtaagactccatctaaaaaaaaaaaaaaagcttaccacttcccttaaacttaccctcaattaaagacttattctctggccctcctaacaaaaatacaaacttattactgacaaggcagcacctgggtccagcaaacagggattccggcgcccaaacttgcatatcatgaaagggaaaggagcatttaaaagctctgacattggggacagacactttaatggttctgtcaatggagattaaaacttgaaaatagccaagggtacacttttcgaggtctatattttaaatgaaatgacaagaggaatgaacctgcgggactaaagtgcttggcaccatttgggaattatttgagccaaataattgctgtcatgcctggtgtgatgtatattttatttcaatcttttaagaaataggaaggagaaggtgagagaaaatatgttctacacaagagactggacaattgatcattaaccacagactcagaaatcaaaggagctcagattgcttttgctcccataataagggagttgtaaaaagataggagatggttacaggttatatttataaagcattaaaactgtccttctactagaaaatacaagcttaagctcagcattataggcaaatgttgcttttgtgttccagcatcccttcacatgacttttaataaggttatatccccctttttattttcctggatcaaaccccagttcacaccagagaacattgattctaccctcagttccagcatgagtcttatgggcttaggtcagaaacctactttatcctgtccattctcagtgattggtttagtgagggatgtgtagttcaacaaagctttgtaacaaacagccccaaaatcttggtggcgtatttaaaaaaaaaacaaaaaacttctttttctcactcacgagtctgcaagtcaactggtgcatctctgcttcagagttcagaccagatccacctccacatatctccatcctgggttcataggatgcttggagcctgcccttcttgtgcctataccataagggcaagatcctaagcatcccacacaagcatatctaaagccttctcccatgtcacgtccactaataccccactggccaaagaaagtcacatggccaagaccaaagtccttggaatgaggatgtcagggaagagaggaaagggattgggtacaatagtccaatctactgcatccacgtggctcagaaatggtcagttacatgagtcaacatcttccttttaatattgagttgagtttttatgatatttgcaataaagcgggtgctaactgagactcttagtgggccttgtagtgcctggacacagttgcatatttgtcaatttctccttgagaagaacctcagaaactctctaagtgaagcagaaagttggtgaaagatctatgacagatgacaacagaggtgaggacaaatttctaggattcagccccttctgatttctgaagtagatttgggcaccggcttccagctatgagcaataacatcagaaaaattcagtctggggtaaaggtcaccctgaattaagggagtgaccgaaccaaacatttacaaaatgagatgagctgccattcctttcagacatccatggtcactaaaatacacagtcctcttgtccccttgctgacactattagttaatgtatgggcttaaattagacagttgagccatgcctccagatgggaaggacttggtaactgttactcatcttctcttctcatcctcaacacaccttcaatttaaatggagttgatcccattaacaactgttagccaagatctttcagggctgggccctgtgcaattagggaagcacctggtagagctatccaaccagagtctgatcccagatccttcccttccaggctgtgagatcctggccaagtggcttcacctctctgagcctcagcctcctcatctttaagatggactatcacccccatatcatgaaatgtggctaagaagataaactctgggaccaaagcaccagggtttaaatcctggcttctccacttcccagccatgtgacttgaacaagtgatttcacctcttcactcctcagttttctcttctgtaaaatgggaataatgacagtccctacctcatgaggtgagtgtgagaattaaatagctaacaagtagaagtgcttagaagagttcctgacacattgatcactcagtgtgtgttactattattaaaactggtagtagtagcattttccttcctcttaaggaacttagaaataatcttattgtcataagtgtatagacaattacatatggttcagactccaacctttataaagtgaatgtgttctatgtgcctggcaccctgctaagcagcttatatacattaccacattatcatatttattctcacatgatggtgatgacaatgacgatgatgcatcctccatcacaacaatgaaaactgtgaggctcagagatacccagtgacttcagtgattaaggtcacacagtaaattatgcttaaatccaggatttaaatgcaggccatttgactccagaacctgagtctccccatctgactatccggctttcacaggaaaagaaacgtaaaacacaatctcattcatctgattgttcattcattcaatagtatttattgagtccttcccatgtgccaggcatagaagaaggcagagaaggtgcattcacctattcatccatccatctatccatccattcttcatccatccatccatccatccatccatccattcttcatccatccattcatccatccattaatctatccatccatcctttcttcatccatccatcattccatcatccttccatatgcacataacacctaatagttctaggatgtaatgtctccatcaccagcagagtttctatcattcatgggatgaattctgggttttcactagaggcttccccatattcactgtaaatttctatgcccagaatctattcttaggaaattaggccagtctctgcttccccagatgctaagattcacatcctactctccaaaacacaagcatccgttggatgcccagctggtccattatcagattcatctggctcagtctccagactgggtgagttgtctgtacaccccaggatgtggatggatgcaggctggatagcgggggtgttcacatcttggtatttacaagatgatatttacatcttggcttcaggcatgttagcatgtgagtcttcatttgaaataccataaattaatagcgactaaaattttaacatttatttggtttaaattgcgctctggattcagaaatatatttggactaggagctcttccaggaatatttaaatgatcatattttgctaaagttgaatctttaaagaaaatatacatattcaactctttagtgagctggattctgagctgtttttatttcctttcttaaggaaataatgtgtaacatttagttttgattctgtgattggcattccagtcgattagcgtagctcatttgggtgtttggtttaattcagatgactaaaaatgcttatttatataagtaaacatatctgtaaagtagtcacatttcaaaaattttggaaaataaaattttgaaaaaaatggacatgtttgatgtacgatgcagcgttttccattgcaaagttctgaatcttcaagttctgcaatctttatgactagtctgttgtgtttattggggataagaccacaggtctctataacccagaacccatttgatacatatgggggacaaagaaaggaagagaagtatgacatggatatattctatctcttgttttcttctaatggaagataggagattaaaaagaataaaaaagaagagagaaggagcatcaatgatgaagaaagaaagaagtcaaaagcactacccaattttagagaaaactctgtgtacagagacacaattaggttgtgtcagagaagcctagttgcctactgctgtgtgggagctcctagaaaacaagccctctcctgctttgggaatctcagtagatgtgaggatgtgggcattgtggccactttcccccagtaggtctctgagtgtaaaaccaatacaacgatatcccttctttccttctttatttgtaactgaacccttattttgtatttcaagaacctaaataaccagctaaaaacatttccaaggctctcttttatcctggagtggtacacagatctaaccaatggttattaaacataagctactaaataggacttccaagaaaactctttaaaaggagttgacgaagtgctctttgtcactgtctgtcttctgaaacttggtcatgttgactggagcagtggcagctatattaagatcatgaggatggagctcacaataaagataggggagtaaaaagccagaagagactgcctctagacttgtttaatgtgagaaaaaaataaacctccaaggtttttttaggggggagggagaagggaagggtctctgtaatttttagccaaagcaagcctcagaaaccttgacccttattttaaactacacataacataccacctcctgatgtggcagtgtgccaatttcttctttctaggtgggttcttttttgaactgagatgacagatatttctgcgacttttccatttgcatggaaaatgtcaaattataatgtatcattttcatttcaccatactaacaaatactcccttgaagtcaataactagagagctcatcccagaagtaatttcctgttcatcaaatttttgaatatatataatttttatttgctactcctgctgggaaacctgttggcatctatgctaagccctgaagattttattgctatttttctaaaattgatacaagtcagccctcagataacctttgcacgtatgtgtcaagaggcatcacagaatcatgaaatcaagagttggaaggaacgtgaagaatcattagagttgagatttgcttacgcagtagggtgaaaatttatagacgttgttaggtgtcaagacacatcagagtcttgttcactcctagaaaaaactgctcctccacccaaatctttctgatctaagcagatcagaacgttccattcttcccaattattcagtttgggtcagccatgggtctcactgaaggtgatccaatcagaatcaatcccagatcttttgtgggagccagcccctttcccctttgaggctctcagtggattcgaggacatggacactggagccactttaatctgataggtctttgagagtgacagccagtcgggtgcagtggctcacgcctgtaatcccagcactctgagaggccaaggtgggtggatcacaaggtcaggagattgagaccatcctggctaacagggagaatccccgtctctactaaaaaaatacaaaaaaattagccaggtgtggtggcaggcgcctgtcgtcccagctactcgggaggttgaggcaggagaatggcgtgaacccgggaggtggagcttgcagtgagccgagattgcgccactgcactccagcctgggcgacagagcgagactccttctcaaaaaaaaaaaaaagagtgatagccataccaagatgtcccagtgacctcacgtgagcactgaatctatctggacttgatgtctgactgcaataaccatacaacttactgtccaacccaaggcacttgtcaaagtgagttggagtgctattaataattattacagttattagttaacaagcataaatcagaattgctgtaggcaaattcttgagacaagaaatctcatgagacaaaaaatctccgtcttgataaagccattcagattcttggagtacatttcatctccttacattagctagagagcagttctgtgacttattgataaggcgacaaaataatttgttattcaaacagggtcactttggagagtgaaagagactgctattaagtaaagaagcaaacaggcacacactgggactcccctattcagaaaagggctcatcctacacattgagtgactgccaggtagaaagcactgctcttatcaagaagtgagcaatgaacattgtggggtggggataggatgggatgatgtcttgtcttttgcatcttgatttacaaaagcacaaggactccctggttctgtcctctactgattcctgatacatttgtgttcctaccactattcttgcttacaaaatagggcctgtttataaaccattgcttaagtttttgccaggtaatacattcagatggcttaacaatcaaagtaatagaagaggattcatttaatgggctcactcccactctgagcactccactccctcgcaggtaaccactttaatagtttctaatgtgtccttcattgctttttcatgcaaatataagcaatataaacacatagaaccttacatttctcctttcgtacatgaaagcaatatcctatgaatactgccatgccccttgctttttctcatatgctagatcttgcatatattcaagaataactaccccatgggccaggcatggtggcttacacctagaatcccactgctctacaggctgaaggcaggaggattgtttgagcccagaagtttgaggctgcaatgggctatgaccatgccactttgccccagtctgagagacagagcaagtctctgtctctaaaaaataatagtgataataataatggatctcatttctattttatccatttcagtatatagacattcaatagtttttactagattgcctttgtttttgtttttaactagtgtcctacagaggaatgctgaattgttttctctctttggttctcaccaacaatgttgtgatacacacccttgatcataagtatttgtagacaaatgcctgcagcataaattcctgggagtgggattgctggctcaaacactaaatgcacttgtcatttttaaagatttctccaaaatgacctccacagaaccagtgctgcatcaccccccaccagcagtgttagagaatgtctgcttctccacagccttattgactagggtatcatcacactttggaaattttgctgataaggtaagcaagaaaaggtttatcagtctaatttgttacaatcaaaaccatctatgttaaaaagacgcccaggaatctataaagcaagtagccccacctgacatcactgatcacgcttgcggagcagaagagaatggtgccgactccgcctgggctccgccccgccccgcccagctacctaaggcagcgggaacaaaatgttcaacatttgacctagtcctctgccaggactgcctcctggagcgggaggggggaccccaattcatgtttttatttgttttatcaactgttgtgtggaaggtttttggggtttttttgagacagggtcttgctctgtcacccagactggagtgcagtggtgtgatctcggcttactgcagcctccacctcccaggctcaagtgatcctcccacctcagcctccctagtagctgggactacaggcgtgtgccaccatgccaagctaagttttgtattttttttttttttttgtagagacagagtttcatcatgtctcgaactcctgagctcacgcgatctgcccacctcggcctcccaaagttctgggattacaggcttgaaccaccatgcccagctgttttttttttttttttttttttttgagacagcctcgctctgtcacccaggctggagtacagtggcaaaatctcggctcactgcaacctccgcctcctgggtttaagcaactatcctgcctcagcctcccaagtagcttggattataggtgcgtgccaccacaccaggctaattttttgtgttttagtaaagacagggtttcaccatgttggccaggctggtcttgaacttctgacctcaggtgatccacctgcctcagcctcccaaagtgctgggattacaggcgtgagccactgcgcccagcctgtggagtttgttttttgttctttttttttaacattacagaacactgtgccaatgacctgcccccatcaaatggtcacacatgctgttgccagcacggcaatgctggcatctctttttaaactcgccacatgaggaaaagtggagatataatttctcttggcttcctgagtggtacaagcatgtgtcaagttaccagggagatttgatgaagtgtaatatacctggccatctgacagttagtggccttgtttcctttccctgcgataatattggatttcatactgagagcatcaacaagagaaaggctcatacctaacagctaatatctgcagaacatgtgtttctgctcaatttctgcacctttatggctccatctgacactgcaattctttctgctgcaaaacagcctgattcgaatcatctgtcttacatctaattcaagttgaagtctattaggcaaaccaattcctggcctatttgtgtcccttctcacaaattattctagctgattctctggcactagttttgtttttgttttgttttttgttttttttttttttccaggaaccaatagctgaaaaacttctgatgatgttaaaggagatctcatattctttttcatgttgttttaaatgacagatgacaatttggcatcctcacaggacaacgtgtccatctgacataaataatgtgctctgatttttttttaaagaaacacaaagcaggagaagatgtccacctttacattttccagcacaaaaccaattctttggaaacctgtatgtttcttgatcatctcttgccaggttctgacagctcagtattcaagttgctcacggcaacagccttgacaccatgctgagacacgtgttgtcttgttcttcacacataccatgcccaatacacatgacaaagactgttggctcgaccttaaaaatctccccagcttcccctagttctcccagcccactgctaccactgtggtcccagccgctggggagactctgtcctcactggctcctgggtcggcatttaccctcaccatggccccttgccccctgccctaataaaatggtcagagtggtccttttaaccacaagtctgatcatgtcattcctctgctcctgcctcacacagataaaacccagatcctcagagcggcccatgaggctttgtcaggggtctggcctccttgcctctctggcttctctgtccacgaatctccccccactctgctgtggccacactggtccctcgcttctgtttgaacatgctcctgcctcagggcctttgcacttgctgttctctctgcctttctctcagatattagccagtctccccctctcagggcattcaggtttctgctccatgccagtgtcctcagggaacctcccttgcaccccgacccctcttcctggcttcactttctctctcagcatcagcctcctcctggtacacacgagatacattttgtctttattgattgtcctcgaccacagcatgagctccttagcatcagcaccttggttttggatcccctgctttagactttgagctgagaacagtgcctggcacattacagacacagtaacctcttgaatgaatgaatgaatcaatgaggggtcagctgggaaaccaagcaaaacagagcattccttggagtcccaaacaccaagggaaatatggcacatgaacctcaggatgtccaaaaagccaaaaccagagttacatgaaactatacatttttttttaattttagcacctcccaatctttgttctttctgaagaaaccaattcaggcccagagtttctgccttggtgtgtgtatttttaatcagcctttctttgcctgctcagcagctactggggctcctgggtccactggatggatgccccatctggtcatggagccattttccctttggagaaaatgaggctgacatgagcacttgctgcctttgtcagtcaggaccaagatacacagcaccaaacgtcagccaaagatgagactcctgcaacaaggggctactcagttgaaacattttgtataattggaagatgaggttaacggcgatagggaaaattcaggtggacctacaagggtttatgaagcagatgctgaaaaataaacagatcagggggtgtccaaccggccccgcctgactctgctatttcttggcgagggatggcgcgacagccaagatgtgtgtttgcttaaaatcaagggctgtggaattgggtcagggacttcagttgaaatccagctgcccgttctccagctgtgcgaccttgacaaggcccgcccctgacctttccccagtctgtaaagtggaacaacattcataagaagcgtgactgccttaggggctgctggcgggtccagaatccacaggagaccagacaacttgggggtttctgggccacacacacacagggcactttctcccgcagggctctgctggctggatactcacttgctccagggaagccactcgtccaccccatggggtgggtactgccgctctcctactttccggaggagggaaccaggcatgcagagggagcctcttgcccatggcacacagcaaaagccccagcgtcctgagctcaggggccggccctgtcccactgacaggtttgattctatgaaaggatcattttccctcctgctgttggcttgtgtgatcattggtcactggtatctgggccattccttgagccctaaatctgaagaatgcaaaagtttgatgcccaggcagcttaggggtgccatgaagaccttgtttcccctgacagcccccaaccccagacccagcgcatggtgaactgccctctaaggacccagtgccagccaaaccaaaggcaccgtggctgatggaggccacacaaggggtcattggtccagcctgaggcaggtgacaatgtcacatgatgcaaaaatcacgggatagtggaaaagggaatagggattcaccacaggtcatgatgaaatgggaaaggttcccttgtccccctcacagggcgtggaatggaggactgcggctcgcttcttcagtgccctgctgctcaaacctctctaagggagcatatagatgggcaggttgtggggctcggctccgacccacgatatgtctagagttgaacgtttacagctcctgaagtgccagttggcgtgtagctagaaggctgtcttagtttgccgtctataggtggcttgagttaaccagcacaattacctcttttactttgtcacaaggacagagggttttcttgtatcccaggttcttgccttggtgtacctgaagaatcggatcacacataggcttggagaatgagtatcaagttttattgagtggaagtcgctctcagccgatggggaggccagaagggagatgatcttcccctggagttgggccgctcaggggccctggctctcctctctcctccaactgcccagccaaactctgcctcaccccactggttgatggcttgccagcctgggtgcctgttggtgtgcttttctgctggtgtgctcctctcgatgccctctcaacgaccagccgtttgtgctttcttccactgatgtactactcctcagatgtctggccgcctgtgtgtctgcccactagggtctcgggtttttaaaggccccggaagggggtgtggcaggtcagggtggtcttgggaaatgcaacatttgggcaggaaatgcctttcctcacctaggtccgtgggggtggagccctagccaggtaccacgccctcctatacccagcacttccttccccacttccatattatttaaagggaccatgcacttcccttcccagcacgcctgtatcaatgtcagcttcccctccttccacttcccagaatccaaatatgtaggagaaagaagtggggccagtttccaaagtatttaattaaagggccagtggaagaagtaagactacaattatacaattattgtggttgtttctctttaagtccctgaatttctacaatgtttttccagctaggcttaaagaaaaactccttgggcttaatagaaagagttgcattccatcagcatctctaggtcagcatgtttcctactcttctgagactgttaggatcattttcaatctgtctgaaatcaaattaaaacaagtcaaaactgtgccgtggactctgctctgagtacagtcctcagttacttgcattcatttgtccaggagcacctaccctattgcttgtgggcccctttgagtttggagagcaagttcaggtaccactgttttaggaagctttttctaatggaggttgtgggctccaatgtccttggcacagaacagttgccagacagggagaggtggggggtagaagggacagggggctggggctgcacacaagccccctctgcagtgacagctgtccagtcctaatgaccatctcccagtcctgggcctgaccccctccccaagagtcacctgtgtcaataacagtgtatcagcttctggaagtgattccaaagtactacagttatgactttccatagaaactagaccatattggccaggcgcagtggctaatgcctgtaatcccagcactttgggaggccaaggtgggcagatcatgaggtcatgagatcaagaccatcctggccaacatggtgaaaccctgtctctactaaaaatacaaaaattagctgggtgtggtggcatatgcctgttgtcccagctatgggaggctgaggcaggagaataacttgaacctgggaggcggaggttgcagtgagctgagattgcgccactgtactccagcctggcgacagagacaaaaagaaccccaaacaaacaacaaaaaagaaacagcaaaaaacaacaacaacaaaaaattaggccatattttggtgcacacatgtttctataaacagcttctcacatcacatagggtctagcatcttgcttttcccccctgaaccatatgcactagagacctgtccaccttgctgcatacagatacctcttcccttatactgctgtgtttgtatgtgttaatgtctaggggtgaaactcccagttcatatcccctttcccctaaggatggacacttaggctgtaagtggtcatgagtatgtttgtgaactagttctagttctctagaactagatggtgcaactgtctttctctgccctgcactgaagatagtcatggtcatgggacttacactgaccaatggaatgggagcacaagtcccatgtgtcacttctgggtagaagcttaagagaccctccctgatttgtcagaggccctctgtcctgcctgggctgtcataggagcgtgaagaaggagctgtcctccactagatccctgagtggagatgacgtagagcagaggcccagcctccctgagacacacaagcagcatgagcaaaaaacaactttagctgttcaggctcctgggatttcggtgttgtttgttatcgcagcagcatctcatctaccccagtggatgcaaattcttcctctgtttctccaacacaaacaacgctgcaatgaacagccttctcaacttttccttgacctgtgtgagtgttgcttcaagttagatttttaaacaaaaaagtgtatcgtacaaaactgtattttcttctcaaagagtaaaaataagctttctgctaaatgaaatttcattggaaactttgaaaatgcctgaacttaaatatttaatccatcactacccatttaatatgaagctccaggtaattggcatccattctccacatctggctttttgttgaattaggcacagttgtaatttgtggttagcccagggatggtgaaattttgagtctcttggctggaaaggactcacagagaacctcttgctgagaagagacaaattcagcatcctttccccagtcccctcccctgtgtttatttgtcctgaccataaatgtgcaccctctgctgtgtgtagatctgcagctgcaggaaatggcagacaatcaccttgcagggttttttcctggtctcagaaccccaatgtcattttgcattttgctcccctgtatttagcccaggaagggggttagggaaagtcacaaactgcccatgcagtgaagtcttcaaccttgccaacctttgctcaggcctgtctgcacattccctgcatttatggttaaaacccctttccttttccccattataatttctccctaggaccctaagatggaacaggcctgtggactaggcaggattcttcacagctggtttgattgctcaaggctgagccggtctctgtttggctgcaaagattaactgagctccatcagcagatcaattaatcactaacaaattcaggctgatgagtttttcattccctttcaggccacaggacatgttatagacagactgccaagtcattttaaacctgtgaacattcaaattgcttcagagctgagcctattctagaacgtagcaattttgagcctttgtgcagctctgattcttcataagccgataatgggtatgtggggagcataaagcgagattggatggcttccatttaggatggcagaaatggaaatctgaacagaagtagaggaatcatcattaaccttcacaatggcgtccacacctctagaggtgggaagcaagaacgtttaagcaactgtgctgtttactgggcactcaacttggccagtaagacactggtcaggccagggatatctgggttccactaaaataaagatcgtttccaaatgggtgatgactggcatggctagggggtggggaggcatgggcagtccagagaagaaggaaaatagttcatttacaagtccctttttgggagggatgagagaatgatgaaagctaaggtttgtctagcattggccagaaattaactcccagaaattgacatgatcagcaataatgattattccatgtgaacatggcttctttggtgtaaatttcctaatttgagtttctggcatccattttcccatcttgcggtaaccagaccctagtaactaagcagtcactctcccattgcccatcactgggttcaggaggagctccatgtttggatctaagggtggagcatgtgaccaggtctggccaatcagctggtaaatccccgtgaccaggaagtggttcaggatgagcacgtgacatgagttaatccaagcagaatgagccttggttctagagcaggagtgaccaggagagatgctccctgggacaggcggtgttagatgtccacccaacagctccccaccccttagttccccagtccacaggctgagagtgcccgttccttgctttcccatcctcctttgcagagagggcagagtcacatgacccagtccagccagtggaatctgagagagcatctggtggggtgtggggtgtggggtggggaggtggagggttctgggggggatttgccccatctggtaaaagagatgttcttgacaagaggcttccctttctacctgtattggatgctgttgggtgaatgccacaagcttagagctagggcagccattttttcataagaaagaaaaagtacatatatactcagagtgcttacatttggagttactgaatcactctcagagctaactatactttcaggctccttgtgtaaaaagaaaaaagaaacttcataagtaagctacttttagacaagattctgttacttatattgatgtgtaaacagagctactgggagccgtgttgctatcctattgagccctggaatgatgctatcataaagaagagcaggactgaaactgtcttggtggctttctttgagcccctagatccacctgtacctggaaccttacctctgagttgttccattacatgagccaatgcattttctttttgctaattcgatggtggggggttatgtaccttttttttttttttttttttttaagacggagtctcactctgtcacgcaggctagagtgcagtggcatgatcttggctcactgcaacctctgcctcctaggttcaagcgattctcctgtctcagcctcccgagtagctgggattacaggtgtgcaccaccatgcccggctaatttttgtatttttagtagagacggggtttccccatgttggccaggctggtctcgatctcctgacctcaggtgatttgcccactttggcctcccaaagtgtatgtgctttttataattaaaaacatcaaaacttataacttcggcataacaaaggatggcataaacgaagacaaggaagagctttccggctcatacattacaaaggattaatttaatatgctgtaaagcaacaagaaaaatacagataatttgacagaaaaatggataaaggatatgaatggattgtttacagaagtgaaatgcaaataaccaataaacacaacaaagatgagaatttgacctttaattaaacaaatgaaaatgactattaaattcacctatcagattggcaagacaaacccttcaaggctgtgggtaaacagatactcctattgttctaactaaataggtacgggcagcttggcaggtaacttgtcaatagctatcaaattaaaataagaatgctcagaccttttgtgtaaatcaggttccatgcaggaaaatgggaaccactccaatctgaaaaacagagagcaagagtcagttccacaggtgatggaaaggctaggggccaaatggcagaaactgagtcaagacagagaagaaggaagcctctagcagctctaggcataatgagaaaatgaagaagtgtaactcctggcacccacatctggggtgacccaggagaagacagagaagcacacaggggctcttcagaagctgaagccacggaggaagcatggttactgtttgaggcaaagtaagagaagagaaaagaagtgttcagatcttcacttccagaaagagagtggatacatttttcctcctcttcttgctaagtacagctaaaacccctgcaagtatgtataaaacaaacctaagcctctgaacagtggagagaagaaggcagaccagcagggccctcgggataggagaaatgacaggacagtgagttcctggggttttcttttgccttctttattgtggactgggtgctggagaagctgacaacctggaaatgccaacaagcacagacaaaagggaaatatcaggaagagcctgtcttctctacctgaagggcaagaaatagggcagcctagcaagacacaaaacttttggacaaccaccccatgccggacaaacgacatggaaaaacctcagcccaccctcatccatgccagtgaagagcaagtgaggaacctgaacttccacctccacctagctgtagcaaggcacccaaaccccgactggggtggtgttggagaaggctgggcaggagcctagacttccactctcacctgatgtaaggagcctcccacccacatggtgcccagtggaggctggtgaggagccctaatgagatatcattgcacctccaaaccagggtgctcagagactcgttgggacactgagtcctcacccccacccagcagtaatgcgatgtgcctcccaccccagggtataagtggaggccaagtggggaactggggctccacccaacctggcaataacgaggcgctgttgctgaacccccacccccagtgtggtatgaaaggacgtctgctaacacctggagatttgggtaagatctcgagtctcctagcatgctgcccaacatggcaaggagtccatcaaaaatcactcctaccaagaaccagtagcagcttaagttaatgggaaaagacaagcaacagatgccaacatcaagataacacagatgtcggaatgatttcatagttattttagaatggtcattgtaaaaatactttcatgtgctgaaaatgagtcaaaatatagaaagttttagcgaagaaaagaaaagtttcagtaaggaaatagaaaatataacaaagaaccaagtggaaattttagaactgagaacacacaataaccaattttttaaaaaaatactaaatacctgggctcaatagaagaatggaaaagatggagggaagcttctgcgagctggaaaatcgaccagtagaaatgagttatcctgaacaacagagagaaaatagaaaaaggattgaacaaacagcgctctaagcctccgcaggaaaactgcagaccccggcccccgtcatccccaatgatttctgctctccagaaagcaccactttttatctcttctagctgtttatcattctctttctttctttctttcttttctttgcttttcttttcttttctttcagatggagtcttgctctgtctccaggctggagtacagtggcacgatctcggctcacagcaacctctgtctcccaggttcaagtgattctcctgcctcagcctcccaagtagctgggattacaggtgcctgccaccacacccagctaatttttgtatttttagtagagagggggtttcaccatgttggccaggatggtctcgatctcccgacctcgtgatctgcccgcctcagcctccaaaagtgctgggattacaggcatgagccacagagcccggccctatgtctatatttctaagtaatatgtttctgttgctaccagtttttttctgtaaacattatctatcgcctatctgctatgatcaatgaatatttgcttcatagaggtgctcctctacccattctccctggcccatcaactggtagagttaccgagacttcatgcagtgtccacactaatgtaatggagtaaaaagtcttcatagttgactcgtgtggtgtagactttaattgccttgtttctatagcatttttgctttccctagatataaacgatctacttccacttctttagttttctccatagctgtcactaattcatccttaaattcttagctctgtctataacccatgtctcaatgtgatcacaccctcaggttagggggatggttttgtgtttcactggcaacactcctcggagtaacggctgctctttggatctgcttcagaacagtgatctagacatttccgtggtgcttcagatccatcctggggaccctttcctacatcctgtgtctgggatcccacagcatctccattctagatctgtctctcctttgggtggaacacatcttcctctcacagctctgagaaagggcccaagaagctggttctccatgaccctgcaggtctgcaatgtccttattctgtccttgcccttgatctagtgctccccattccacatgggaagtaaatttcccaagaagtttgtaggcactgctccattcttgcttccagagttgcgttctcggtcttagtccttaatatgagatcagctccatcactctggaggctttgagggttttctcttcttcttgggtttttatgaatgcatgatggtgtcgccagtgctgggtcttttaaaattaattattatggtaccatgagggcccagaaagtacgtctatctgttaattgtgtcattataaattaattgtaagattacaaaaatggcaaaggggaaaatcacacatagcccacttttttttgttttttggcaaaattaagcaaaattagcatggccagattcacctacaccaatgccatcctggactggatcttggaccttggaccaccatgctgggtgctccctcaatgctcctccaaacccatcagactccggagtaactcagacccctgggcatgtcacctgggcagcccgaggcagagcacagctgcgctccccacccctcgtggtcctctgcctgagatggcccctatccgagcagctttgtggatctagaagtagagccagccctttctggctgccacaaaaggaccttccaagcaccttcaaggctgacacgagccccctcccaccttgggatgtgatccctgtcctaccttccattgctgagggcagagaacctctgagagaccaggagcaggaggtcagccagctgcagtagcccctgaaaccacagcccttccctgtgtagccctcacctcccatgttctgtggccagcagggtcttggctcggtgcactcatgggcctcaggaagtcagtcctggactagacggagcctcacagatccacaggcagtgtcaggcttcgtctcccagtcagggcccagtccctgtttttaactttctttgctggagctgcataaataaataaacacacgagtgtgtggacggatcctgccctgctttggattcctaaccccagttggtctgctcccgagttgccaagatctgaatagttaagataagggaaatcctctgactcttctcatctgggccatttgcaggagggcaaacgtccctccctaaagacaattatttcacaatttcttgcatttgtattgatttgtgtattggtatcagccccttgctaagctctaagctccacaacaagtaaagcaatatgttaacagttcatccctcatcctgatccttcccattccataggagaggtcattctttctccaagagtgatctgggtgcattaaaaaatgcaggttcccaaatcccacccctaaatgatagaagttgggccagggaatcagatatctttgctggctcttcaggtgacttatgtgcatatctacctttgaaacactttgaagtagataagaaacagatctatgcttttcttttttttcttttttttttttttttttgtatttttagtagagacggggttttgccgtgttagccaggatggtctcaatctcctgacctcgtgatctgcctgcctcggcctcccaaagtgctgggattacaggcatgagcccccgcgcccagccaagaaatagatctatgtttttctatagaagaaaaaaagactggcccttctcttttggaatttcaactgtttatatttaatgtaattagtcttatcatttcatgataacttcttaggatttgttttctatttgcatcaccttttctcttctttccttgtttattttgcattaatcaggtattttttaaaatatatatatatattcctattttgtaatcttccgtgagtttgtcagtttgacttctagtctttttttttggtttgagacagagtcttgctctgtcacccaggctggagtgcagtgtgattatcttagctcactgcaacctctgcctcctgggttcaagcaattttcatgccacagccttccaagtagctgggattacaggcatgcaccacgcctggctgattcttctatttttagtagaaatggggttttgccatgttagtcaggctggtctctaactcctggcctcaagtgatccgcctgtctcggcctcccaaagtactgggattacaggcatcagccaccacgcccaaccctattattctttagtaaacatcctacagatgacaatatatatctctgatttattggagtctccgtaaaccacaacattactgcttgggcaatggaagagcttcagaactctctaaaatcatttaacctccttctgactgttgtattattcttgtcaaataatttaattctatatataaatttccacagctaatagttactgctgttttgtatactcatggttaatttaaatttcccaatatatttgccctttctattgctcttcatttttattgcattttccatttaaaattatttttccttctaactgaagaactgcactcagtatttatgtgaatgcacatctgctgacaataaattatccatttttgcttatatgaaactatttatatcactttcaaaggatattttttaataaaatagaattttagattgacagttgctttctttcagcatttaaatgtatcattccatcatcttctggtttaattgttcctgttggtgagttagctgttttcttactgtttgtcttttaatagtcatatctgtagttctcagcagttttactataatgtggctaggtatatatttctttctctttatcttgctggggttcttgattctgtgattctgtgatttaatgtttcatcatctttgaagaatcttcacttgaatatcttcatatagcacttcttcctggctttctctttccattctttttagaatttaagttacatatatgttagaccgtttttgttttttgttttttttttgagacggagtcttgctctgttgcccaggctgtagtgcagtggcgtgatctcggctcactacaagctccgcctcccaggttcacgccattctccttcctcagcctccccagtagctgggactacaggcacccaccaccacgcccgactaattttttttttgtattttttagtagagacggggtttcaccgtgttagccagggtggtctcaatctcctgacctcgtgatctgcccgcctcggcctcccaaagtgctgggattacatgcgtgagccaccgcgcccggcctagacctttataaaatcatgctccctgtggtctaatgctgttttgtgcatttgcaattctttctggtcttcatgttttaatatggttatttccagcaaacctgttttctgctttggctaatccgctgttacaccaactgtgttttcacttacagttattctacatttcatttagcaactcttcaagtaattcatttttagatattccatttctctaataaaattctccatcttttcatctttttattgaacatgttaataatagatttaaaaaaattatctgtgatagtctcattagccaatcgtctgtgagttttccttgtctttttttcttatggttttggttatttggtcttatttctgatacgcctcataatgtttgtatgaatgcggggcattctttttaaatattgcatctctggatgatgtacctttccccagggaagatttaatgttttttttttttttttcctgacagctactatagtgaggctagattaccataactgtaaggattcaaggctgatttttcatctttctgagatctgttttatttggtttgttgttccttccctagatcgagtactttgaggtactcaacagaaaccactgtttattttccatggctccaattatttaatgatgaatccctgaactctaagttttgctgctatggcatcattatactggggaaaacctagctttgttttttagcctctcagctgcacagtttcagatgggcttcaaacctctcactctgtctctgtgcaacttaggaatgcataattgctgcaaaaggaaagtactgcagaaaagcagactcactgctagaagttctattttctttaagatctcggggtctcagaccctggctttcttggtagccccaaacatcaagttttgtgtccccagaaccataacttgctgaaaagctcagttcttgtgactcgtagctccccttatttacaaactggcaaactcccaaaagggaaaagaagccgagaatgtcaggcttagatcaatgcatttcccttctctctaaggccttggtcctttaagtcctggcagccaaaattcctccctgatactttcaaataggtcttttcctcagtatactgctagttgttctatgggtctttttgaaagatgagattatcttttcgaaacttgccatctctcaaaacagataagtgctaaatcacatcagttattagggcctcgtgaatgtccaaaatggaaatattccagagatggacaaacacttaagagcacctatgcagagctcccattttttcaatttgtaagttctaagtttatagaaaaatatgaatgttttaaattttggtacctacttactcttgaaacacggtgcttgaaaaacataatcaaagttaagaaatttgaaggattgcagcatggatgttaaagcacagattctgaggtcacactgcttgggtccaagtcctgctttactcctgcctagcaggtgacctatagtaagttatttaacccctcttggtcagtttccccatctctaaaatggaaaagataagtatgccaatctcaagggatgctgggaggattagacaagttaacatacatgaaacacatagaacccaaaatcatgactgctaggaaaacattcactaaacaaatgaaccaaacagtttgctggacagaggccctctctaagctgatttcagcccacagcccaccatactgaagcctctgccctggtccagccctccatgctctacagatagggacaaggggaggtatagaaagaaggggcctgctcaggcattcgcacaggtggttagatgtaaaactggaggtaggactggaattttcttttgatgcattttatcaattaaattgtgtgctctgtaagtgaagtagctaatttcccttgaaggcagaggggtcaaatctccctcaaactatagataattctctaattgctgtgtctgccccaaatccattgtgatcattagcagagacccttgtgctccggctgagagaggagagggaggctcaggctcatgattgctcatctaaatgtttaataatgctccaatctgcagatcactggggcatcaaacctaaattagcctgatactcaaagccacgaataataaggggaatgaaagggataaagtttatttaatgaacatttcatcaatgcagatttctcattgaatattaaggttttggcttgaagacagcatcagagtggagtctgctgtgacattgacctttatccctcagagacacaagtgcaaagtcaggctggtttcactctctgagtgacagcatggtggatcgtcctggcagttacagtgaaggaaggccctgagcctggggtagagctggctcagcccccttcttttcagggggtttctctgcaggtcccggcatctctctccaccaaggctgcccttcccggacctcccactcctcattcaggagctcctcccttcttccagctgtgcagcccaaatcctgggagtcctccctcatctatgcatgctgtcctcttactactgctgttcaatccatccacaagtgcagtcagcctgacctctgtgaagacctgcttagaggctctggtcatgacagtgacagccagcgccctttcagcggcatgcaaggtcacgcacagatccagttgtgtcccctctgacctcagcccccagtgtcctccttgcacatcttcctctagacacattgccccctgcccctcagacacactacacacacctgtccaggcccacactggctgtccctctgccttggaccatctcccctagaatccatgagacctccattccttcagcatccttgccccatgtcaccttctcaaaggtgcctccctgagcgcctgcttagactcctgcccatcccccttgttcccgtcatcctctgcaactttcctcctgggggtcatcagcacctggctccagacattgctattgtttgaagttcatcaggtgctcagcagcaagactggaggaaacagacatgaatagcaaggacctgccaatttctaacaataagtccaccaggagtagtgtcaggccgggtctaggtcctggggacacaccagagggcaaaagagccagagtccctgccatcctgggctgccccccgtgcacccacggaccctggacctccagcaggagggggaggagcctcggctgcagacacggctctcagggaagccctttggcggaggggctgttcgagttgagctctagacagcagaacaatccacccaagtgaagactgatgaagagtgcaaagagtcggagatttccggaaacgggggagggctttgcctccagccagggtgaccgaggaggacagtatgagacggcagggtcgtgtggcccgtgtgatgatgctgggagccgatgcgcattgatccgtgcgccactttacacgtatgttctcttttaatcttcacagccacctgctaatctgttattagcccattgtacagatggggagactgagaggtcagtctgtgcccagcatcacatttctgtactactcagctgttgtcacggtaataccccatcacaaaccatcccaaactcagtgacgcacaaccgccgccacgtctcagctcctggggctgcaggtcgtcggggctcagctgatctgagctggggtcccttgggcttgttgggctccatcgggggactctgcttcctgctgagaggcacgggggctgggccccgggatcaggttcccgtccaccctgcggagctctcctcagcctcagggcggcggctcctcagggtccttttgtagtgaatgacagaagcccagaaccaaaccagagccccaggcgcatccccagtccccgcctgcatcagaaccacaggggctgcatgtccaaagcaggtcactttcactgcacagggcaaggagggggccctgggacagcacagggcaagagaagggggtgtgccaacctatagcagggagtggacagctgggaccctgacctgctgagcacaggcagatggggtggtgaccagctgggccctcacctgggcatcgggctctgcaccttcacccacatccgccctgtagcctcagtcatgggaggggtttggatgctaatcggggggtaaggggaagctgtcctgggttgaagagtgtcccctgcaagttcaggtccatccagaacctcagcgtgcatcttagttggaaacagggcctttgcaaatgtacttagttaggtaaaactgaagccacactggattacagtgggtcctgggtgcagtgatttgtgtccttgtaagcaggccgcgtgaggacacatggggaggacatcatgtgaccacagaggcagagatcagagccaagcatctgccagccaaggatcccaaggtttgcagggaccgggaccgcgggagcttgggaggaggcggggaacagtttctccctggagcctccggaaggactgaccttgccaataccccgactccagctttctggcctcctgaactgtaaggaaaagtgttctgatggtttcagccaccagtttgtggttgtttgttagagcggacccgggaagctaatacagaagccggaggaagggcctcggccgggaacacacactcggacttgtctttggaaagacctcaggccccgagggcggtctgtgaatgtttctgtcggtaaattaaattcttgagggttttgccttggctgagtccttgcctatggcctcccaagagttgaaggtcacatttggggctcacccacctttcagccccttcttatctcctcatcctcagggcggcatttctgttcctctgttaatccaaacaacagctctgtctctcataaatgaggttgccttcagtcatttgcattttaacaaatttgtgccttttgtccctattttcctaggcaatgagtcaaagagcagaagaagccccttcaccctccagccacacatcacccttacacacacaacagcacaaagtggggccctctcccatcagagcagggagaagacccttgggccttgggatgtggagcaagtcacttttttctcctcagcctcagtttacccctttgcaaatgaatgggtttgcctaaatggcttccaagggcttctcctgaatccaacattctaggattcaaatatttattgtagaattctcagtattccattctctgagtctttccctcatccaattcttcagcaaatcctcatgcagagctcactctgccacaggccattttcttacttagagcagggatccagcagcgaacagacagatgaaattccacactcatgtgggtgacattcctgtgggtgcaaatgacaatagcaaaactgcaagagagggcatcaattccagatggtgacagtcctgtgcaggtcacggggacatggcgtcggagtgcagagggcttccttgggaaggtcaggggtgttctctgagtgggtgacacctgggtgaagaacaaagggcaagagggcgcaggtcagagggcggctgtgggaagagcattccaggacgcaggagcagcaggtgcacaggccctggggcaggaggactggggcgtgggaggaggagccagaggccagtgcggctgggatgggggagtgaggggaggtggtgggaagtgatctggggaaccagcaggactctgctgggccttgtgggaggtgatgaggaggtggagtctgctgttcccagtgcagtgtgagccgctgaaacatccgctcagggccacatgaccattttcaggagctcactctgggtgcgtgtggagagtagatttcaggcgtgggaagaggagtgggagcaggaggtcccatgggggctgttgtaatgacccaggtgaggacagaggtgcagactttgggacagcagcagggtgtggacaggagtggacagacggggtgcattttcaattcaatagattccatggcagctggaagatgagggagggcctgaggatgctgcctgctcactggcttgaggaaccgggcgtttggtggcgccaccaactgaaaggggacactgagtctttggtggcttcattgaaaacttgccagatatgaaagcctgagacgctccgataactgagcctccaggctgtcctcccaagggccttctggataggaggccatgggtacaaaggaactggcatcctggttcccatgtcccaggcccaacccagggactgagccccaggaagaccacagagcagcacaaagcccagatctgctgctgcctgggcagagccaagcccaggatttatgaaggaagctggcaggagcggaaaaattccttcgaagattgcctcactcatcaccatcctcggtggcaccctcaaccacaggatggagaatcattagaagatggcagtctcatagggtccttcaaaattaccacttgcatttgaacaaagctgtgctttcttagccccaaccctccccataagcctgggctatcaactggagataaatttagctgcaaaaaaatgtcaagattcagatacccagcttaatcaaggacacattcttcattcctcggactgttgtacttctcaggagaccccagggattgcatgagagactgaatcatcttgtaagtgaaattagaaggaaggaaggaaggagggagggagggagagagggagggagggagggagagagaaggagggaaggagggagggaaggaaggaaggaaagaaagaaggagggaaaaggcaagaaaggagaaagaggactctgaacattcagataacaaaagatttacagatctgttctgacgttctgttgacggggcaccccatgttcagccagttttgcctgtttcagtttttgtgacgagtgctccttgatgttggatgttgggcacaagagcaccctcctaagcatccagcctctgtctactttttcccttttgtgggcactggtaactttctcagatcagcactagaaactcccctttggctaaaataattaccaatgtgaaaataactgagacagggtagccctaccacatgccagtttgcaatgctcagcacgcaccaacccgttcgtgcttcccaggacctgtgaagacagagctgcttttagcccactctctgctggggaagcacaggaggtggggaactttcccaggttagaggtgggccctcagggcaggttgtgtccccagggccccctcccacaggcctttctccaacaaagcagcccccccatttatcctggccagataactgattccttcctggttggccttggtctttggaggacttgcaccgagtttgccaggagggtgggactgactgtctttggtgaattcatggggagttccagatggagccagcccctgggaacctggcaaagcaaagcttaggtttcctggtaggggaggcccagagaccatgtgctccccctgctggggcctcgtccaccagcccccagacagccgcctgctctgcaggacccaaagtcaggagacagaggtggacaatccatgttgcctcttaaatgttgcagccacaaggcaagaggtcctcaagatgcgtcccagcaaaatctagagatgaaagtcagcctgtgtgaagagtgtcaggaacctactatggggtcattgtacattttccctagctaaaaagaatggaaaccaaaaaaatgaattataaatagacactgtagggcttcttttattattacacatatacagtttcacaaagcagtgagtcacccttattcacattaagcaaagttccagcttccatgaaaaggtcatttttctatgcttttctaagatcctgcctgaaggtgcctgtttctctcatgggaaggatgcaatgctgcctctcaccattgcagctcctgacagcctatgaatgcccgaaggccttttcctcctctgtgatagacacattgtgatatggattttcaaggtccattttattccttccagaagaaaaagaggcttcataatctcagagcagatttgtcatatatatatgtgcgtgtgtgtgtgtgtgtgtgtgtgtgtgtgtgtgtgtgtgtatatatattcagaggttattggggaaagacataggaattgcttttttctttttaaattgatttttgttttgtggcagcaaactatgagatgaacaagaatgagcataaacctaactctaaaacagaagaaaaatcactgatttttaaggagaagtgcaaatagtaagagaatgcatatcagcatgcgtttatgagttctaaatcttgccaaaactaaaatcgtttttaagaaaattttttaagcattgttacaaacattgaatgcatcatcttcaaatgtctttagtagacatggaggcatgggagaattaaagccagtctttaggaaggaataaaaagctacactaaagttaattattgatctcacaatggatgagaagaaaacacttggattataaaaaggaagcccagacaaaataatatcactttgtaatgtcgaaaacttaagattttaacttttatcttatgtatctgtttctgatgaacattcataattatacatattgtatttattttctttgtcttataagaaaagataaaggataaagagacgaatgtgtttcaggcgtggttcagcctatgaagtctccatattcataggaagccactggatttatacaacatcaggggatcataatgaacaccacggtctactctgagtcttgcaaaagtgagaacaatgttaaaatgaaaaccccaattagcctgaattaagaggcactattttgttctgaccagagaggattttctctgtgtggtcttatagttgaagtctcctaccagtaagttagcatgtattggagaatctaagatctttcccaagttggtctgttttagtcagactgtcctaattccaactgatggcatctaaataaaaatttatcttattaaaaaaggcataatgaggagtaattggctcatgtcattaaaaagtccaagagcaatagcttcaggcatggctggatccaggtactcaaatgatggtatcaggaagtgacacccacccccccacctcctagctgtgacttgttctctgtgaatcccattctcaggcaagctcttctgtcctggcacctattcacatcctcaggagctctgagagaaaaataaattttctgtcccacagtttcaacaaaagtctcagaattgagtctcacatgtccacctatgatccaatctctgtccaagggcatagaattttctaatggctcaaactcactgctgttacagcaaaagatagcaaaagaacccagactcaagcttttcaaacaatgttttgctgtttagaagagccatgctgcaggaaggaaggaggacagagaactcaccagttactagtggcttttcatgacctggcaaaacaaggaggtgacatagcaaaacaagcccattcagattgaatgacagggtacctagacccacctttcatgggaggagtgtttaaaaccatgcagcatgtttttaaaaccaccatagttggtagtcagctcaaaacacatcctagattggcttttcctcttcccgcattttattcttgccagtcccccaaatccagatcctgggatcatttctgggaaataatctacctgctcttgtctcaggtcctgcatgtggaggatcccaggcaaagacactgtccatagccccttcaggcttatcggatatggtttgttttagatggaaatgagttctatactgaacctgcttcaggtggaatttgtgattatccttgagataaaggaaattcacccaggggtaaattccaacataaacacatattctgctttctttcaaaagactactttaccttctacttttcccatctcttccattaatggttgcctgcattccctgaactttgcataattggaagagctctttaattatcttttaattctttctcaattttcagatgcattagcatgtataaaagggagatgaaacattgctcccccctttttatttaactttataatccttttgttacaacgtggcagggtctggtttgactcaaattacacatctgagtagctcattaaaaagaagttgcctgggagtttgaatttgctttctctgctgagtcactttacctccataaacctcagacaaataaagttcagaactggaggtcgcatacaatgctggtttatgttaaagtattcaccatttacctgggtcatacttaagccttgatttttttccctttcctaaaagaagcaacctgcgacttttttgaccagaagaacagttagcatgcttaacatctttgctgatttaggagttatttcaaagaggtcttctggttgatttactttatcttacttaggggatgctattttgttatctttttaaattttttattttagagactgggtattgctctgtcacccaggctggacagtggcacaatcgtagcccaccgcagccttgaattcctggactaaagcgatcctccccattcagcctcctgaacggctgggactacaggcatgcatcaccatacttggctaatttttaaatattttttttgtagatacggagtctcactatgttgcccaggctggtcttgaactcctggcttcaaatgatgctcccgcctcagcctcccaaagtacctgaattataactgtgagccactatgcccagcaaagctgtttttaaaatgggttttttcataagttgatgatagtgctgggacaccccaggtcatgaagacccccaaagctcctcaagtagacaagtaaagcacaagatagactgtcgccttgctggttggattctcatacaaccaaatggcactgtgggttgagaggatgctatcttgtttacatgtcagaaaacctgaagtttatcaacaacatcaagttggctgtttgctctgtgcctagacagtcttcttgtatatgtactgtatacccaataacatataaacaattcatctgtttaatactttcaacaccctctgaagaagatattattttctaccccaagcacaaacaggagaaaacagaggccccaagagctcatgtaactagcttgtagatggtacaacctcatcttgaacctagaactccaactccagagcttgggccaataaccatgcatcacctttgcaagggagtcttctagggtgaccagatttagcaaataaaagcacaggatgcctgcccagttacacaatgaatatctaaatattgcatggtcctggaatgaatctggcaatcttagattctcctggctgaatctccagtgctgacaacatggcccagcacagagtcctccacagatgaccagagacaaagcaggaaacgtggcccgtgggactgatatcgtcaccatgagacctgtgaagagggtgacgaggcacaccaagaggacaaaaggaacaggttgaaatgtgtggctacgtctagaaggaaaatgataacaggcatccttgtgaagagacactggtcatctaaattcatggcacgtctgcatagcgttcaggaaagtgtttcaaaaacgtcctcaaaaattttccctatctataccccacttgtactatgttttacttttttctttaatttgactcactgttttacataaataaatatattcaaacagaacacttgatatcaccactgtaaaagtaaaactattatcatttgctgtaagttgaaggttactatatgatatggttcggctatatcctcacccaaatctcatcttgaactgtagttctcataatccccacatgttgtgggaggaccctggtgggaagtgcttgaatcacagaggcagctacctccatgctgttcacgtgatagtgagtgagttctcatgagatctgatggttttataaggggcttttccttcccttcactctgcacttctccttcctgccaccatgagaagaaggacatgtttggttccccttctgccatgattgtaagtttcctgaggcttctctagccatgctgaactatgagtcaattaaatctgtttttttatagattacccagtcttgggtgtgtattagcagcgccagaacagactaatacactgtaaggacatatacataacttaaaaattgtccaaataggccaggcacggtggctcacatctgtaatcccaacactttgggaggctgaggcaggtggatcacctgaggtcaggagttcaagaccagcctggacaacatggtgaaaccccttctctactaaaaatacaaaaattagccaggcgtggtagcaggtgcctgtaatcctggctactcaggaggctgaggcaggaaaatcgcttgaacccaggagacagaggtggcaatgacctgagattgcgccattgcattccagcctgggcaacaagagtgaaactccatctcaaaaaaaaaaaccccaaaaaacaaaaaaaaaaaaccctgtccaaataatgcctaaggttatttttcgtgttacagtgaatgggtactacccatcaggaaatattggttgaaataagggacattatgcatataaatttatactaatggatacaaaaatattcattttaatatattaatttgactccttaggaaattcatttataattttaactctgttgagctattcttgaataatcacttaaaaatcttaatgagagaaaatcaaccagccagaaacaactcccagctgagccctgacaaacccatatggcagtcacttccagggctgggttctctttaatgggtgttataggagtggttctcatggagatttctgttactttagttcaaagccgctcatgccatgaattgcaaacaattgaagaggatcagttatgaatttattttgggaaaggccttctttgttgaagatacactggaggcagatttttgtggcatatccggtaattgatactaatcctgcatgcctctgtaagagggttatacactgtgaccttttgtcatgtacctctgcagggccctcccacatgggcagagtggatctcccaccccatacactttgagcttggtcatgtaacttgctttgagccatgtgagaagactttgcatagaatccacctgagcaaagcttgtacatccgacacaaattgcacatgtaagtatttcttcaagcaattgttcctcttctagccaaggtcccagaacaagagaggcacaaaactgaactgagatcattttacaggctgtagccaagcccagctggtctgcagcctgagccaacatcagccaaacccatctacactataggctcttgagtgtgaaaataaacatttgttgttgtaggtcactgaattttgggttggtgtgctacatattaccatgatggcaaaaactgatatatctctgtattttaaaactgagcccttctttgtctgcatttattggaaatgggctcctaagaagtatctcatgctgtggatagacaaaggcactaggtcaggggcacattgagagaatggttttctctcgccatcaatagcagaaagcacaggtcttcgtggttttctcagtccttctaccttaaagcaggtcagccaagttcaccacccttgagccaggcagtgtccagcaacctcctccaacagtggatggcccaggaagaagaagagaataaagaagaagagaagagcacactcctgagctcactcctttcatcttcctgctctttgatttcaaagtaaataacttgtgaacattttcaccccgatcatctgagataagatggagatgggtatagaaatgaatgtattgattaggcaccattcacagacctgctcccttttttgtaagaggctgtaatttgagcgctctgatttttcaagtcagtgaaatgctaaatggaagcccatcagccagtataaaagagatttccaaaataacatcacagggaaaagatcttttgataatatattcctaaagagttttaagctacataacattttctgcccctaaattggcagctcttgcttccttcgctttccagttttccagatttccatcccagaatgttttttatgttgcaaaacgtgcttaccacttacctccccaccaggcggaattgtctctttcgcatattgcagttaattttaaacccgagatgggtgacttcttcactgctgagtcactggaatgggaatggcctgatgttcggcatacatgtgggcagagatatggggtctgttagtagaaaagcaacactcagcatatccctgaagagaccaaaataacagacaaatgaatctctgctgctctccaagaaggatcttcctttagtagaacttttcccaaaaacagaaaaaaggagtctttctggccacctgtcaaaatctagacaagtcaagaaataagtgacatgcaaaggactaatatccagaatctgcaagaaactcgaacaaatcagcaagaaaaaaaccaataatcccatcaaaagcaggcaaaagatatgaatagatatttctcaaaagaagatatacaaatggccaacaaacatatgaaaagaggtccaacatcactaatcatcagggaaatgcaaattaaaatgacagtgagataccatcttactcctgcaagaatggccataattaaaaagtcaaaaaacaatggatgttggcatggatgtggtgaaaagggaacacttttacactgccggtgggaatgtaaattagtacagccactatggaaaacagtatggagattccttaaagaactaaaagtaggactaccatttgatccagcaatcccattactgggtaactacccaaaggaaaagaagtctttatatgaaaaagacacatgcacacacatgtttatagcagcacaatttgcaattgcaaagatatggaaccaacctaaatgtccatcaaccaaggaatggataaagagaatgtggtataccatggaatattatgcagttataaaaaagaatgagatcatgtcttttgcagagacatgggcggagctggaagccattattgtcagcaaactaatgcaggaacagaaaaccaaataccgcatgttctcacttataagtgggagctgaatgatgagaacacacgaacacatgtgaaggaacaacacacactgggtcctgtcagagggtggggagtgggaggagggagaacatcaggaagaataccttagggatattgggcttcatacctaggggtgctctgtgcagcaaaccaccatggcacacgtttacctatgtaacaaacctacacacctgcacctgtacccctgaacttaaaataaaagttggaaaaaaaaataaagtatggatttcatcttaaaaaaataaaataaaatgtggtatatatacacaatggaatactactcagccataaaaaggaataaaatgatgtcttctgcagcaatttggatggagctggaggccattattctaagtgaagtaactcaggaatgaaaaaccaaatatcattatgttctcacttataagtgggagctaaactgtgaggatgcaaaggcgtaggagtgatataatagactttggggacaaggggggaaagttgggaggggctgagcgttaaaagactacataccaggtccagacggggtggctcacgcctgtaatcccaggactttgggaggcggaggcgggtagatcacgaggtcaggagtttgagaccagcctggccaacatggtgaaaccccgtctctactaaaaatacaaaaattagctgggtgtggtggtgcacccctgtaatcccagccacttgggaggctgaggcaggagaatggcttgaacccaggaggggaggttgcaatgagccaagatcgtgccatggtactctagcttgggtaacaaagcaagacactgtctcaaaaaaaagaaaacaaaaaacaacaacaaaaaactacatactgggtacagtgtacactgcttgggtgatgggtgcaccaaaatctcagaaatcaccactaaataactaattcatgtaacccaaaaccacctgtaccccaaaagctattgaaataaaaatttaaaaaattaaatttaatttaaaaaatttctcagaaaagaataagtgtcatgggaacattttagaggttatgaaagaaacacaaagagaagtgtctctcttcagggaaccctcaagatgtagacagagacaagattttaaaatgtacaagaaggacgtatgtgtgatgtcacggtgccagatgaacatgctaaaaattccaattccctgagtctccatctacagaaaagtgcttccattataaatgatgcattttgctgtggttatacccgcgtcttctgaaaagtatgtgttttaattaagtattcttccttctcctgtagatgttagaattcccagtcagtctaagttttgatggtccaggcatcatctaccaccgctcgagccgaagaataagaagtcctcaatcaattttggttgacaacctagcgacgctgggaagcctgggaagacagatctcactttgggctgggagggttacaaagaaggggcgtcttcattttgtgaggaatcgtaatgttcccttgcacatgggctgtattttctcagaagctgacactgttttcgggcaggaggcccatgcatgaaatatgactcacacttcgtatcacagctgagagtgaccgcagtgtgaacctaagatcagttctcaatttgtacctggtcagatgcagctgctggaaaattcccagtccctaacagtctaaaacgattcgtaaactcaaatagagagaaaagtggaatcatccttcaatattactatctggactccccccagctccccgccacacacacaaagcctgccaggtctccacactgcgttcatctgagcagaatttacaagccccacaaaggagaactcaggccacgacagctaccgggcaggggacacagatgggccaggcagttggtattgtacagaccttggcaacaagagggtgtacactgaccaaaaattaatgcatcacaactagattattagaataacccatgttcacttcacgctgagcatgagcccactcattgctcctcagtcacagcttccctccctccactccctcatcacaaacctctctctctccttaaatctcctcctccctgcctgctttaccagggctccaaagctccctctcctcccctggctggtacccgatgtgcctgcagccaggggcacaagtgtggggacaaggtgcagatgcttcagctggtcattccccttctccctctccaatacctggaccccttctctgcctggggctccctgtcccagaactggcccctgagaactgtatctcctgggctccctgccctctggcattcagttggggttcagcaaaagggaggctcccctaaaggttaaggacaggaggggaaaggttggggtgcctcttctttactctcgctgtggtgtgaccgcagccctgtgggcagccccttccctgcaggagtttcccagggttgcccatgcactcccctccacctgcccctccagccctgggctctgggcagctccctcacttgctggtccccaggtgctcccagtttccttaattctgccccaaacccctgccttgcatgcctgtgtttcccaccgggactaggtgcgaaagaatctgctagaccagagcccaggaaacaatcaggaaccgagtcgctgacccaaaggaggctcagcagagaggaacctaagtctgcagccctgggtgctgcgactcttcctaccacagaaaccagcaacgccgcacatggccacccacatccccagtcctgcgcctgcgcctcattggccctgtgcacacatcgccacggggtgccccacaccacaacctgccctgaggcttggctcctgcagctgaaccaggctacagagcagcagggaggggtgcaagctctccttggaaccctggctcagccccttccaagctgtgtggctgtagggaggttatttgccctctctggcctcagtctcctcccctgtaaaatgggtggcatgatggacctgcctcgtggggtgggagggggcttcagtgatatgctgcaggcacagtgttcagatccaggcctgcacaggacgggctcagtaaacccgagctctggggattttcctgtgcctgggatgccctgcccagcttgcctcccgcagcccaggcctctctgtagactatgcacactgcacaggtttctacccttccgtattcaatctgccctctgtatctgtgggtgggttccacacccatggattcaaccaactgctgatcaaaaatgtttgaaaaaaaatgtgcgtctgtactgaacatgcacagactgttttccttgtcacgattccctaagcaataccgtataacaactatttacatagcagttacattctgttaggggttataagtaatctagagatgatttaaagtgcatgggaggatgtgcgtaggttatatgcaaatactaggccattttgtattagggacttgagcatctgtgaattttggtatttgcaggaggtcctggaagcagtcccctgtggatggcgagggatgactgcatatacattttcctcaagtccccctgcagccctcttccctgcctttaaggaaattccatgtctcccaggcagtgtccacacctctgcctcaccaccactcaccccggccctcccactgggcttcccagccctgctccccagagcctttcctgtggagctccctgtgctccccacaaggacccgcccagtccctcctgggtgtctgcagagggtggccctggggcctctttcctccttgtctcctctccttcctctctccacctagccaggccttctcagcaacttttgtcatctcatcctcctgcagggggcctaaatgcgggtgtccctcaggttccgtggagtctgccttctcattcgctctgttccccctcctgggggtctcagccacccttgggccacagccacacaggggactccttagccacaccagccaaccgctctcctggcttcagacctgcaggtccacatggctgtcccacggcaccttcaactcagcccaataaattcacccccaaacgtaggctctttgggggtcaccacctcagtgactggtgaccccgtccctccaggcccatccagaaccctgggcagctctcccatcccctgtcccttcctctccctctcgtctcaaacccaagtcctactgagttgactgctaaatggctcttggctctgttccattccttcttcctctgctgtcaccctcctagctcagctgaccgtcctctctcacccacatgatggcttcacccacctcacagaccaccctggccctgggcagcccctcctccccattccccataccatggacagagggaccttctggccacatcacatccctgctaacctcactgaggtctcccactgcatttaaagacaccccccgtgccacaacatggctggaaaggccctgcactgtctgctcctccagccccaacccctgccttcttccctcgtcatcctcaccccaacgctgcttaaaccccactgaacttcattcagtttcttcactctgctgctccatcttgcctccaggattttgcacgtgcagttcccctgcctgggactcttccctgctcttttcatctgcctgagtcctcatcatcacagcagcacaccctcctggaagtctgtcctgggtttcctgctcctacctgctcccataacacctgagctgcccaaacacacagataagccctgtggtgtcactgctgggtgctttctcatttccatgagcaaaggacggtgaccccctggcccactgcccaggacagtgcttgacacagtgcggtgggaggaggtctcagcaagtgtctgcagagtgaattaaagaattattttatcctctgggctcctcagctggatcacgagctcctggggaagttactgggggcaacactctccgggctcccctcaacagctcacagttcgcaaacatttgactgagtgactgagtcagctcaggccctgcagtctctggctgtttccttccaatcgtggtgaaagtcaccctcgaaggcagccctggggaggatagaaggcagcgccttcccgtcactgagcccatggcaatcagagcccaatgtcaccagcgactcctgtgaaattagcagtgacttcacgcgttgagggcatggggcaaatgccaccacctgtcggtatttccatcgggtctacacccaagaaagggggagatgctgcctttctgaagtaggttgtgcctgaggcggcctcagcagagaggaaatgtgtaggcgtccacagccagcccagcctgctcagaatcgcacccacactgaagttctggagttggtggcagtgattcctcctccagcttcccagagccttggagtgcacttaggagatcagcgaggcctctgtgcactgatggaagctggcttccccagaaatctgctggagtgagggcctgtcaggggccctcctggccgacgttgaccaggactggcccagggaccaggtggacacgagggcaatgatgtcacagctgccccgacggttgatgccccgtggcttgccacggccgtggccttggagacagggtctccggcgcagcgcctcagctccgcccatactcgctccgccctggtgggctccagcctttccctttccctggggctcagcctcccaatcagtcaaatgggcagattaacacccatggccttgactccgtcagagactgggggaagaaatcgtgagtcagggcagcgaggtctgcggggagcgttgtgaaggtgtgaagtgctgagctcccaggtccctggctgccaccatgggctcggagccgcgtggtgagttcgctttcattccttaaaaacaggcagccgctaagtggagaaactgggacaccctttgcatcttctcaatcttagttcagtgctgtttccaataaaccacggctatcctttatcagggataaagtcctttggatcatccaacttcagcttggacagagtttcctgataaataacaacaacaatcatagttgcctgtgtttcccagaaaacaaagatgaggcaaaagcttatgtgctttagcacataaagtgcattgttggaagagtgcattcccaggctgcaggagtgaggaaaaaggagaaggaggcagaaaaggatgaaaagaaaatacaaggaagcttctatcaagctgggcacagactggggacagcctcactgcacggtcttgcagaacgttctcagagatgggacaggagctgctgtaggttcagtctacctgggaaagagggagagggatttgctcaccaaatcccatgtcccattcgtcaatgtctgccccacgaggtattaatttccagcactcccggagctgcctgaatgtgggcccccaagggtcccttggagttgagatctcaaaggtaacagggaatccctgacatgtgccaggatggtcctctgccagaatcccctcccgcaacatttcccctgggtctggagaagcctaaggaaatagaagtgggaggggccagccctcgaagcctcattaactaaggcttcagcgtgggacagttactatttcatctgatggactcctatcttaggacttcaagtgccctttcttttctctcctcctagataactagtactcatgctccaaggcccagctcagatgtgatttcattcctgacttttcaaggcggaattctttacattttcccctggggcccccacaacacttggcttacccctctttatggcattgtgatggacactgccatgattttgcgcatcaagctcctgccttctgttaaaatggctgggctttcctttgggaaccccctcagttaatcagatgtgagtgggactgatttctccaccacccctagtcaccccatccagagagtggaggtcattggcagagctattccaggaccaggtctggagactcttggtccacgttaccatccatctcatctcaggctgttgatttgtctatgggtagttatctcatagttggtacaagcaatactgttgcttagctcacctatcatctgttcttaaccctctctccctagctaccttccagctaggcattgcaggaaacagagtcctggacaatgaaatataagtagaagtctgctgtgggtttcctgaaactgttttgctttcttgatttagtcactgtcttgccctctcttccccatcttcctgcagttgatgtgatgggtatgatggatgtgaaagatggagcagcagcagccggtttgcagccttgagggaaaggccaagaggcttgtggaagtctcggtgatgccatctccaagatgctgaaccacgaccagcaatttcctaccccagatttctcaagatttgaggaaaacagttatgtaattaagtttctatagctacgctttctgttcctggaagctgaaagcattcctgattaatgtggttagttttctgttcaactagcaaacagtacagtggtaatgacagagtcctagactatctgggctgaaaggaacctcaaacagaggtcaaccagtgacctgtcctttcatttcacagggacgaaaagggacaggaaaggggtcctttctggggtgcttgtccagggtgcttcagggagagaggggtggaaccaggactgttttctgcatttctcagcagctcacggttgctttcaccacacctcactgatgtgtgctatcttccaggcaataatgacaagagccaccatttacttattaggccaggtgcagattaagtactttgcctatatcaattcattacattctcaccaaactcctccaagggagacagtcttgttatcatttgcatttatgaggatgaagccaagcacagagagatcaagtaacttgtccaagtatccaaatccagacattgtagtgatgatgactccaacctcaggagtctggagcctgagctcccacatggaaccactaggctgtactgcctgggtggggtttcagaaatgctggtataagattccaggctggtaggagcttcttagggtgagacgagtaggggcaaatcagcagggccacctctctggtaaagtccttggggcactgcttccgggaaacacaatgtcagtggtgccactgggctgtccaatgtggtggccccagggttttgtccctgcaagtgtcacactgtgagttcctcaggaactagatgacaacataaacaaatgaagccaggtgactatagtgaggggtgtggaatgaggccaattggggagcccaagcaccttctaaaggagcatcggcccctcagcttcagcctctgttactgtgggaaaatatgggtccacattttacagttttataggttttcaatgactgcctcaaatctggacctttttctctctctctgctttaatttaatttaatatatctctcttggttgtgcatcatttaattttattcttaggtaatttttttattgttatgtcatccatataccctaaaattcaccattttgaagtatgtagttgaatggttcttagtatattcacaaacttgcatagccatcaccactatctcattctagaacattttatttatttttatttatttagaagtggagctttcctatgttgcccaggctgatctggaactcctgggctcaaaggattctcctacctcagcctcctgagtagctgggattacaggcacaggccactgtacctggcttcaattctagaatattttaatcatccccaaaagaaaccccacattcaccgggtacagtggctcatgcttgtaatctcagcactttgggaggccgaggcgggcctatcacaaggtcaggagttcgagaccagcctggccaacatggtgaaaccgtgtctctactaaaaatacaaaaattagctgggcatggtggcacacgcctgttgtcccagctactagggaggctgaggcaggagaatgctgtgaatgggaggcagagcttgcagtgagctgagatcatgccactgcactccagcctggtgacagcgagactctgcctcaaaaaaaaaaaaaagaaagaaagaaagaaaaaaagaaaaaaaaaagaacccccacattcattagcagccatctcccattcctctccccacctcccagccccagcaaccacttacctattgtctgtctttatgaatttgcctgttttggatgtatcacataaatgaaattgctcactatgtggccttttgtgactggtttctttgacttagcataatgttttcaaggttaatctatattgtggcatgcatcagtactatattcctttttatggctgtataatgccattgaatgggtataccacatttaaatctgttatctattacctatccatatttaaatatgttatctatctgttatgagttattcataaaatgatggacatatgtgttgttgccacttattggttattatgaacaatttgctataaacgtttatatacaagcttttgtgtagacatatgttttcaattcttttacgtatatgtctgggaatggcatatgttgctagatcatatgatatgtctatatttaacattggaggaactgctaaactgttttccacagtaacagtaccattttacatgttcataagcaatgcatgagggtttaatttttccacattctttccaatacttgttagtgtccatcttttctattacagccatactagtacatgtgaaatggatttcattgttttaacttgcatttctctaatgactcacaatgtcgagcatcttttctgtgcttagtctccatttgtatgtcttttcagaaatgtattttcaagtcctttgctgctttcaagattttttttttacctttgtcttctgacagtttgattatgatgtgactagtgtggatgtctgagtttattctacttggaggtcatcgagcttcctggctggtttttatcaaacttgggaatttttttggctagtatttctcagtgattctttccttccctttctgtccctcctttcctcctaggacacctattatgtgtatgttgtcacacttgatggtgtcccacaggtctctgagctctgttcacatctcttcattcttttctctttctgttcctcagaccgtattatctcaatagacccatcttcaagttcattgagtctttccactgcctgctcaaatatattcttgagccccttctagtcaatttttatttctattattgtacttttcaactccaagacttctaactagttcttttttatattttaagaataatttctgtatttttattgctattcttaatagcaaatatcatcttcctacactctttagttttttaaacatggttttctttaattctttgaacaaatttaaaatgactgacttaaagtctttgtctagttaagtcctatgtacggacgtcctcagggacagtttctattggctgcttttgtttcttgtgtgtggtatatactttctttttttattgcatagctcatcaatttttttgttgaaaaatagattgtttagataatattttttggcaactcttgaaatctggttcttttcctcccccagagtttgttgctttttgttttttgttgttcatgatgtttgtttagtggcttttctgaaccaattctttaaagtctatattccttgtcatgtatggaaacaagtctctgcgtgattgaagaaagacttccttaaatgcccggaactaatgtttccagtctctgccgaggacctctatatctcttggggtatatcttcactctcaggcagttgacaactctggcaaagccttcacttcttgcttgagcacagctttaaggccagccagaggtgagagtttaggaccctctcggttctttcctgagcatgcacacagccctgcacatgtatgtgcccttctagattaagaacatgggaacttttcagatccccctgtgggcatctaactccctggatttcacatttatgctttctgattagtctattgtttgccccaactattactaccactgtaggcagctgaaatgctaaacaattgcctctgattgttttggcaaatgttgctgggggaaaaggctgtttatgctcattaaaaatcaagtccagtaaagatagccttgagactggggtttttcagggaaccaccaagcagggaatggggctcagaaggaactccaaccctgttctgatccctctagtagttgcctggctgctggttctcaccaaaattgtgggctattggtttttaaaaagctgggacaagggaggtgataattggattactttaaaatccataaattttgttaatcttaacaagattcaaccatttttgttaaataaacatccctgggttgctgcaagcctctggttaatttcctagagttataaaaaaaatgatttggacaattttggcagtttgctcactgaattgatgaaggagaagattttcaggtccttattctgctattcccactgatgtccagatcatttacgttaaatacagtgttgcatcttatttttaaaaaatcagaaaactcttgggtgggccaaagaaaacttgtgcaccggccagatatgccccaagcactgccagtttgcaatctgcggcttaagaaaccatactttttttctcataagcaattgctttctcttctcagaattgtaggttactcagatgctactcagaggggccttaaagatgttcagttctaagcccatcattttagaggaaaaagaggccagagatgagcagggtcttaaccaatggaacagagctgatctgcaatttctgaaggtctccataaaagctgtgcctcctgaaaaatggattcacaatcagcaacagggagtaggagtgacctgcttgcatcaagaggattgcttattttgattgtggttaaaactacagtcttgtagtttgtttattggcatttttcctttaaaagcactccaggagtctacggtgatcagcaatagaaagataattaaattgtgattttccccataataggccagtataaaataatggaatgaactaaccacaactgcacacaaagcatgggtaacaaacataatgctgagtgagaaaacgaaacacaaagggtacagactgtgtgattccatttgtacagagtctaaaaataggcaatgctaattactgaggatggaaatcaggacagtgattatccctgcgggggcagggagtgacaagaagagagaagggaagattctgggtgctgattccgttctccttctagatttggatgccctttcatgaatgtgttccatttgggaaaattcagtgagttttacacttatgaactgtgcattattctgcttgtgtactatatttactaaacagtttacttaaaaatggtctctctcctacgggttcccacaaagactttaaacttacctgatgtatgcccccagccctaggtggacctaacacagatttcctgcaagttgctctggaagaatcatctcattccagccccgtgatgttgctgtgtggctcctgggtttggaagcacaaacacttcacaggagttcctgggttttggtttattcacaaacacagagatatgctctgactgtgttcagacttagggatagtagatggcctgacagcgtcatattgattagtatatatgaaagcagttgcattttacttctattccatggctgaagtctagccatggggtgttcttagatctgggctgggagaggagaggttacttagcaaccattagttgatggcatgtgggtggaggcgttgactctacttatagcagatacaagaaatatcattaagcttcatgaagccagaacagaggaactgaactgaatagtaattatgattaaacaaaagaatgcgtcctagcaagtcccatgttgtcagtttacgccaacattgaggcctctagctcagataatttggacctgctgctgggtagactaacgctctagggtaagttgcagtgactgcaggcaagactccatggacctggcatgctccagaatcaccagcaggaggtgctgctgcaaacactcaccagccaggccagggccctggtccctgtagttgccatggtgatgacccaacaaaatggagtcaacagggagaacttggcagccactctgatcttggtgatgtgcttgaagggctctgccctgccctcttcaaggtcaagcctaaacagtgaggcaaacatattgaagcatttgctctgcttcctcattggtcaagttgtttctctggtcaacagtagtccaggagcttcctccatagaccacgggtgccccatcctgcaacaagaagccaagcatcctccctggaagtgatcaggccccagctgggttcatggaaccttcagctcacaaattgcatctaagctgttcttcccaccagcttggctgaggtttgaaaaccatattccttttattcctttaattctctgtattttgcctcttttaatatttctcttacatatgcatataaatatataattaaatatcctttctaggtataccaaaatggtcagtttaagctggaaaatacatactcagatgcacacacacacacccattttccactggtcaagtggcttttgtcatgtcattgagtttgaagaaaccttaccaagcttttagcctgatcttcaacccatgacagaaattcctttttcagcatccctggagccttctcagcctctctttccttgaacaccccaggggtgagtacagtatcacttagtaagtttcgggttgcaaatggcaacaaaaagtcaaactgaacaaaacattaaagggaatgtattggctgctgaaattgagttggaggaagctcaggcaggctccacagccttggggtcaattttttctggtggtcttgctttgtcctcaactctgaagcctctattcccactggccttcctcatggtcacataatggctgtcactgccccagattgttgtctgcactccccattctccaggtgggaaaaagtttattttttggtcaatttttattgtattttatttatttatttattatttttagagatggaggcttactctgtcacccaggctggagtgcagtggcacaatcatagctcactgcagcctcaaactcctgggctcaagcaatcctcccacctcagcttcccaagaagttgggactacagatgtatgccactgtgactggctaacttttaaatgtttatttatttatttttgtttagggatggggtctcactatgtggcccaggctggtctcaaactcctggcctcaagcaatcctctcaccttggccctccaaagtgctgggattacaggtatgagccactgtgcctggtcagaggaggtttctattccaaaaactccatgcatgcattcaaagtcctatccactctaaatgattgactgtgggtcacatgcccagctctgaaccaattccagtggtcaaggggaataccacatgctcactggcctagccctgggtcacgtgatcaccctgaatcaatcacagtggttagacgaatgtgatccttttgtggacccatcttaagattgctaaatgttttcatgatgaagtatttcttttatctcagccacttttgatgatccagactgagaaactaattgactcttcctccagttcatcttcccacactcctgagttcaccaaacacccttaagtcctagaggtgggggctgcaggactcacagaggaaatggatgcagagagctggcctccaggcccttcatggtaatagaggagtaaaaatgcacacatgtgtgtgaccacatagacaaacacaccccagtacatgcaaacaccccagcacacctgcccacatctcaatacacatgcccacatgcacacacatgcacacatacgtgggcatacacaaataccccagtatacatgcatacatccaagtacacctgcccatgtgcacacaccccccaacataccctcccatgtgcacacataccccaacacacctgcccatgggcacacacaccctaacacacctgcccatgtgcacacacaccccaacacacctgcccatgtgcatacatacaccccagtacacccataccctggcatataccccagtccataattgcccatgtacacacacactccagcacatctgtccatgtgcatatacatatcggcacatgtacacttatgcacacaccatggcacacacaccaccagaacatatgcgtatgtgtacacacaccccatcacacatgcaaagattgttgtaaagcctattttggagaatgcgctcaggataaaagctacttttcagcttcctttcctctctgcccccaagatatatttcccgacacttctgggtcacagccttcagagggatatagttaatacccaagggtctcaccactgatgagctctaaagaattacttagaagcatgattgtgtgccaataaagaggataactatcctattctctgagggctgcaggcagtcttcctccttgtcccatgacacacttgtagttaacagatagaattgccaattgtcagaaaataggcagcccctctgagatcagctctatgcactttgccaggatttgctttattcattaaagtgagtttttctctcatggggtgtcacatccaggttggcttctcagcctgctgctcttcagctgactccctgaaacaaatttcctaaaactgactctgttgagtcccaatccagaactttccctcatttctaaatgatataaatttccttaggaaatgtttaaattggctaccagtattatggttttatggcatccacattacacatttcacagatttccaaacctgcatgtatcagaactgaaaagacctgagcttaaaatcaaaagagctgaatcactgtgctctctgaagcttagagaaccatttaattggagcaatcaatgtgcaataataaaagcacttttgcagtcgttttacttttttcacttgtaaggacaatggaaactgttcaattgaaaagtgactaattgatcagttatatggtcattcagcaagaattttttgaatgacttctctgtgcaaaacactgttaggtgtgatgaagtgtaaaaagaagtgtaatacaattcaattaaatgaggcaaataatgatgagttcctgccatgcatcaagaagtctgctagattctgagatgaggtagtgagcaaaatgcagatcttatcactgaagagatgacagagtcaagtggtgcatccactaaatcagtaactctcgtttagtaaatgctttgtgctaaagaggaaatgagttaacattggacacaggcaaagtctggggcatgccttcatttcctacaagttacatgctgcatggagaatgtgggtgggtgctcagagagatggtgggctgtggtgatctgtgaaaattataactgtgggcactggctctggactcaggcccctcaggacaaagccgtctctacccttactcactctggatgtgcataggacattgaaatgctccatgcctcagtttcccaagctctaaaaactggacactagtacctaattcattgtgaatgagacagtgcatgtagagagctcttgtgagccattcctggagctcagagggtgggagggggtggctgtcactattggagagtcacagcaagttttggttcctactgggtccaaggagaacgctgacaggcaatgtagccagaaagagtgtctacagcatgataaaagaaaagcttcttacaaattaacagagtttatttgagcaaagaactattcatgagttgggcagcactcagaaccagaagaggttcagagactgccacccagtagtctggacagtgagcttctataggttaaacatgaaagcagataaatcacctgattggctaccactaggcatctgccttatttaggcatggtgtgatgagtgggctgccaatgattggttgaaacttagctgtttctgattgcctgaaatctggctatttgttacaaaaaaaaaatactcctaagttaggtttctgtttgtttacttaccaagttaggttgtaatttgttacttaggagcttaaagtagggggatagccttaggctaacggccttctgcttatttaatttatcaagtacataaagatcatcctgcctcaggaatatggcattgcatccagacctggtaccaagctgtgagcctcccagtctggcagaggctttaaagccatcaagcccaaagcatgtggtctgccatgctcctttgccctgagccatccctccacagtgtgggaggcaacttaatgtagggttgtgggttgtagcaaaactggcttctctctggctggctacagtctgtgaaggcactaagcagcagcgagaagttaagtaaacatcacaatgtcattaaattgctatggcagtaaatcttagggtctcaggttcagaaaatgggtggctctcaacctgggcaatttttccctccaggtacacttgccaacagctggacacagttttggttgtcacaactgggtaagggcataactggcatttacagagtagtggccagaaatgctgctgagcatcctacaatatgcagggcagtcccacaacagagatttcccagctgcaaatgtcaatagttctgaggttcagaaaccttgagacagggcagcagcaatggctggtgcttgctgggggaggagggtggtttaatctgagtcttgaaggaccaagaaagttagaagagcaaacaggagagtgaagtattccaggaagggtcccagcacaagcaaggatgggagagaaggatgtttgaggggcgataaacaggctggctcggctggaggggtgtttgtgcaggcgatgtgtggagggcgtgtggggtttgctctccaggcctgagcaaatcctcaggcttcctctgagaaactccccatccctgtccatgtggtcaggagggactttcagtcaaactacaacctcccgcagtccagggggtaacatgtggccaagacaggaccatcccgtcctcctctggggacctgaatcatgaacagtgacaagaggaccctagaggttgcagtggaatcattgccagcacaggggaaccaggagctgccctgatgccccaaccctctgaatttggctcttcacatttaattttcctagagttctgtgacttacctcatatcttgccaataaatgtcttcaaaaaattaaatcaaggaatccagaggtggtttctgttgctttcactcaacattggttgggagtctgtggctcgggccttctcgtgcctggaccctaactctagggacagctggtttcaccaagcagaaaaatagtccactgaatagaggactgtggtgtgctgtgcactgatggcagcaacacacacatacacacacacataaacacacacacatgagagaggacacatagggacagccaggttcgtggccgacactgagcagccactctcctttcttctttttttttttttttttttcttgagacggagtctcactctgtcacccaggctggagtgcagtggcacgatctcggctcattgcaagctccacctcccgggttcatgccattctcctgcctcagcctcccgagtagctgggactacagacacctgccaccatgcccggctaattttttgtatttttagtagagatggggtttcaccatgttagccaggatggtctcgatctcctgaccttgtgatccacccgcctcggcctcccgaagtgctgggattacaggcatgagccaccacgcctggccaccactctccttttttccttggtaacagagccctacttttgttcacccctccagtagaaaacaatgtgctgaggaaaggtggccctgcctcagccctaagggacaaacatgattgctcaatggttcaaggccaatcaaagcatagtaatcctcttcccctttgtgattgttttgcaagcaggcctgtcatccagttctagccaaagggacttaagggacatctactagaggcttctgggaaagaattcccaagccacacaggagaaaaatcccccagctctccttcccaacctctgttttggacaaaggctggtgatgcttgagccatggcagccactggaaacctcaaggcaaaggccagagaatctcagagatgcagagacagaggcctgacattctagagctagagagtaaaccaaattagagttgtcttttctgggcttcttgttaagtgagttaataaatatcttcttaacttaagatggtgcttctgaaacttcaatgtggacatgaatcacctggggctcttatgcaaaatgcagattcttattctgtagatctaaggtaaaatataagattctgaatttctaacaaactcttgatgctgatgttgctggtccatggaccccactttgagtcattagactataagccacttttagctgcatattctgttacttgctgccaaaagcatcctaactcttttgaccatttgcatagtagccccacccactggatggaacccagagtctcatcttcccatcaatcagattcaccctcctccacctgtgggaggagccgagagacaagtgcttggggagaagaccatcctccttccaaaaggcaagagcacttcctggtgttgtgagcctgggtgagagagagatggaggaggatggaggtagagccagatcgcagggacagatgctgatttggggatgttctgggtcttcgattgcctctttatggtctgtttatgaaacccagacgccctttcagtgagaagcaattctgccatgtttattttgggaaagaagccacaaaacccaaattgtcatctatttcccagtcttttccagtttccaggcatatcatccttttctatgccttggagaacatttcaagcctcctggaatttttcaccaaggagggacctcagggtcactgcaacaggatggcctgctgaaccaccaagaggcctaggattctatcctgaaaatcagggattccatgtgggtctctcaggcccagctctcttgtgaaattgagagcttcagattagtcatattcggacgttgagaggtggagggaacactggaaatggctctgccgctcatgtgctgtgtgtccttgggcaagtgatttggcctctctgaaaaccagtttcctcccctgtgaatggcagaagttgggtcaggtgatttcttagggccttgcctgctctaagcatttcatggtctcaacattctcataaacaggacttagcttaggtcagtggtctccatgttggctgcacatttgagtcacctgagggacattatcgactctggtgcttctgtgttctacccagatgatctgatctgatagatttggggtccagcttggccatcaggaatctttaaaccttcccagatgtcactaacatataaccaggattgaaagccactgggctacgcctgattttatagaagaggaaactgggctcacatctctggtcagcaggtcagccaccagcagaatccagtgactcccgcttgcaggtgtgggacctcacagccaccctctgcagtgcagcgcatctctaggacctggggaacattgcacctttccattcttcaataaacttctcctccatctctttccctctctgccccgcccctcgctccaatgagctaaatctctctcaagtagctcctgcctctgtcctgtgaacgtgcctgccaggaggagtcgccatgcctggttacctccttgaactagggaggaaggagggaaatatgggcttagacacgtggaactcagggtctcccatgtcactctgactaccacccaaagcaccttgctctgggtttgtcacaggacaaggggaagctgctgtgatgtcactgagggtaatgagaaagttgaagaagaaagaggagagaaatagcacatctgtaattagacattcttcctggttgcttctttgcatgttgaaaatggcttgctacaatccagtcatgtttagccccttggggtccctggtgcagtgagtccaggaccaggactgggggctttactcacagctgccttcccaagtcctgttgacctttgagcatctcctgccccagggcccaagagagcgctgcagcagccacacacaacatgagatgcttctctgggtgtgcctggcttcacccttctgtgcttctgatggcagaagatagaaagtgtctcttccttccttgcaagcatttccatctcggaagactctctggggaaagaacacgaagggggagaggcttcctaagtcccttcactgggggcttatccgtgaccgacgttcctggggagacatacatttcatcagtcactttccatctcactccactctccctcctcctctctgcaagcttacactgcagcccgatggaattacacacagtgccctgcatatgccaaggttcttccacctctagtcatgctgcttcctgtcctgacacccccttcccaactcgatcctgctgagcagcctgggatctgtgtacgggacgcccctcagagtcacccagacacaggggaagctggggtgtttattccccgcccctcagtcacaggtgcaggcctgctcctggggcactcaccccagcatctccaacgctaaggcagctcagagagccactttcctgtccaaggaacccttagagaccattcccaggaggagcgaatgtccacctgtgtggcgtcctcctggggcgctccttctaggggggaccccagtccctcctgcccttccacccagaatcctcctgtctcctgggtgaaaactggagcccagattctagctctgctgtgtctctcagactctggtgagtgtcagaatgttttggaggccttgttaaaactccgatggccaggcccaccctgaggttctgattcaggaggtctcagcagagcccagagctggctttcccagcagggccccggggtgctgatgctgctgcccctaggaccacccctgagagccctggctctccaccagagcctgctcacctggagacagtgaccacaggccacaggtcacccctcactgcttcactccacgccctctcctgtgacctcatctcctcccacctccccctgggtcacgtggctccagccacacccacctccctgctgttcctcacccaggatcaccaaggtctctcctaccccggggcctgtgcacctgctgtgcctctgcttggggtgctcttcccagggcttgcccacctcctcagagaggcctcctgacccctgacacggccttgcccttcacctctatcgtcctttagaacagcccccacctcccgcacatcatgcagttgcaggttcaatggctactgcttgtcctccagactcgtgagtaactcgtgaggtggggcggggcgggggcgggggcgggggcgggaggggtgggggtgttttgttccctgctctgtcccggcactcagagcagtgcctggcaggggtgggtactcagtacacacctgttagcaagtgactccgatgcagggaccgttctctctaatctccaagtccacctttcttatactaaggattttcagtgttttttcatgcaccatccaatcttttttgactcttagatcatatgcctcagagcccatctgggtacaaaaacacccgttttcaaaaaaggaaccagaaagtggtttcatctcgctttaggatgtgaatgaaagcctctccttccgtctcccgagaagggactttcagaagctgcaggtgcccaggtccaggccccacgctgtggccccgcagggactgtactcactctttatttttctcttttccagctctccacaagccaacagctctctcctggctttgattttcaaccatttaagttgaaaaaaattcaaaacaaatgaaatgcacttaagagaaagccttgaggagttcagcaggccacccaaagtgaagggactcctttgggggtctttgttgttatcaattatttattgagccctgatgtgttcctggcgccaccaagaccgaaaggagacagggtccctgccctggggcatcccaacaaagaagggagagtttgtgaagcttaaaaatgtcccagatggtaaaacagttacacgtcatacctcaaggctgctctatacttttattatagttttattcttaaggctgtttatttattttctgatgtaaaaggtaatagaaagtttataaactattcctagaatatagacaaaaaataaaattcgacttcgtccagcatttttaatgcacatgtaagaactctacttggtttatggccgggcgcggtggctcacgcctgtaatcccagcactttgggaggctgaggcggacggatcatgaggtcaggagatcgagaccatcctggctaacatggtgaaaccccatctcttgctaaaaatacaaaaaattagccgggtgtggtaagcaggcgcctgtagtcccagctactcgggaggctgaggcaggagaatggcgtgaacccgggagacggagcttgcagtgagctgagatcgcaccactgcactccagcctgggcaacagagtgagactccgtctcaaaaaaaaataaaaataaaaataaaaataaataaaataaaataaaaaactctacttggtttatgaaactgggatttagtttgaacgtgtactcttcagaatctgccttgagttgacatcaaattacatcacctacatttattcatttttcttttctttcttttttttttttcagagtttcgctcttattgctcaggctggagtgcaatggcgcgatctcggctcactgcagcctccacctccaaggttcaagcaattcccgtctcagcctccctgagtagctgggattataggcgcccggctaattttttgtatttctggtagagacggaatttcgccatgttggtcaggctggttgcttacatttctttatgtcataaagcaggcttcaaaacagaaattttaatctcttcagaatattccatcacatagatatatgataattgccttcagtagtcctctattgctggatgccagttttttttgttttgttttgttttgtttggttattataaataacactgccatgaacttccttagtttcgaaagatttgaatcactctcattataatttcagtttatttgttaatttaatgtattttttgagacaaggtctcactctgttactcaggctacattacagtggcgcaatcgtagttcactgcagcctcaaaatcctgggctcaagcgatcctcccacctcagcctcctgagtaactggaactaaaggcgcaccccgccacaccccactagtttttaaaatttttttgtagagacagggtctcactttgttgccctaatttcactttataaacaggaagaaagaaaacctaactttaagtttgaaaccaaatcctaatgctttctcgcagttctatttgctgaggttaaggtgggtatgaaggatgttgttgaacccactaggctgcagttgcaccgaggaactgcgggtctccaccaggagtgagcgcgggctcccagtgaccccaccagcacctcctgtttttttgttgttgttgttttttgtttttttgaggcggagtctccctctgtcgcccaggctggagtgcagtggcgcgatctcggctcactgcaagctccgcctcccaggttcatgccattctcctgcctcagcctcccaagtagctgggactacaggtgcccaccacgacaccagctaatttttttgtatttttagttgaaacagcgtttcaccgtgttagccaggatggcctcaatctcttgaccttgtgatctgcccatctcagcctcccaaagtgctgggattacaggcgtgagccaccgtgcccggccactccagcacctcctctttcaagtacaaatccagaccaaggcacagggcccctgctgggtctgaccttttagcacaaagagccaccgaaccatgggaaacactaaataatttgatgcaaagtaatttctttcttaaacatagggcatccctacagctttctgtcttattttttagctccatatgaaagagtctgctctggggcaagtccacgaggccctgagtaccactgggaatggaagctccactgaggcacacataagcctctggtgcttccgtctctgccatgagagggtggaagagacactgggccacttcaaagttgttaggtggccagttgctgggtgggcattatgtgagggacacttcactttcccatttctttgtaccagacagaaaaacagtggaaaatcagttatctccagtttaaagttgatgggtcaactaaggctctttgggcttaagaaatcagttcatataggtttttgtttgtttgtttgtttgtttgtttgttttttgaggtagggtttcacacggtcacccaggctggagtccagtggcacgatctcagcccactgcaacctccacctccagggttcaagagatcctcctgcctcagcctcctgagtagctgggactacaggcgtgtgccaccacatctggctaatttttgcatttttgggagagatgaggtttcgccatgttgctcaagctggtgttgaattcctggctcaagtgatctgcccgcctcggcctcccaaagtgctaggattacagatgtgagccaccctgccaggcccagtccatatagttttaagctcatttggatttaatataaaagtttaagcttttggcctactgtttaatattgaattgttcctttcatggaatcatgaatgatttttcacaagtttctcttctttttataaaaagtgactctggtggccaggtgcagtggctaacacctgtaatcccagcactttgggaggcaagccgggcagatcacgaggtcaggagatggagaccatcctggccaacatggtgaaaacccatctctactaaagatacaagttagctgggcgtggtggcacgtgcctgtaatcccagctgctcaggaggctgaggcaggagaatcacttgaacccaggaggcagaggttgcagtgagcctagattgcgctgctgcactccagcctggtgacagagtgagactctgtctcaaaaaaaaaaaaatgactctggctctggctctatatctaaggggtcaactgcaccattgtcaccacaatgccattttctggaaggaaaagctctatctgacttcacagtccttaggagccttgttatggaacctggtggacaaaccattttaactggacatgatgttgctttttaatcaatgactcctgaaattttaggtgagtatgagtctggagttttagattacaaacaacaggaagccaattcaacccagctttttaaaagaagatttctaattaaatgtgttgattctgttagcagagaactctgggggcagtgtgggttgcaggcatgggtagatccaggtgtcaaatgacattctcaggacccatgctctctccatcattggctctgattgctcaggtttgggctccattcttgggccactctcttgctctgcagcaagatggtcaatggcagctctaggctctcaccctcatcttcacatctctaagtccagaacaaagagctttccacacctgctacagatctgggagaagatgatcctatctttcttgaacctgaggctagtccttactcctccctaagttctaacatatttacttaaaacaaggcactaatgaaatgactatataagtgccccactgcctcagtaggcaaaaaatgtgtttttatatatagcttattctaacagtattcaaactgtggcttgatcttactgagctccagtggccatagagaatatgattctttcagatgttttcacaacaacttttacagcaactatctttacacctgccttccctttctcctcatcagatcaattagtctggtttcttctatttcctgcttactttccgttcccccattactgaacttctgattgaagaaatatacaggactgggcactgaggcattgaggatgctttcaagttagcagtaaagaaatacccacagggtcatcctgccatcccaacaattgtcttctttctgctaggataggcctcatcactcctcagatgattctcgaaggataacacacaggccagtgggcagccctaggccagggggattaccaagacatgaagactttctttctgtctcagcaaccttcatgcttggtcaagcaaaggtgttgcttaagtcaaacccagggcaggggagagcagttgaagcaaagtgagtctttggaggccctgtggttgtggggtctggtgtggagacagtgagaacggaaaaggtgggagaggagcagtcaacccgtgaatggccccattcagacgcctttacctggaagacgtggcaggtgagcagcaagtgagcgggagagtgggagagagaatgaggaagtgagggagagaatggatgagtgagcacctgcttggatgagccgacacccaccagggatcatgagaacaccgaacagctgaggcacggtggcgtctctcagcagcctccccaggcctgtgcccctgggtcctgacatgagagctgatgaccatttattatcactggtgatgtcaagaggtggcttggaatggttgtaaccgtctgttcattttcatctcacctccacatccaccacaaatacacagtgacgttgctctgcaaaagcagcagcacacagccccccagaagccccttccaggtaattgccaaaagtttcttccatatggaaattctgtagttgtgtgacctcaggctagttacacaacctctctgagctttgccatcgtcttctgtcctatggtaagaatgatactgaggtactagggagctgtgaagcatatgctgtgagacaacacagctgagcagcccagccagagccccctggggaagccgtcagaggtcagcagctcccgtctccttccctcttgactcctaatagtctaggacagaactttgccctcccttcttcctgtcccaaagatgcacaatgataatgatgctgatggttatttagtaagaaacttcccaacaggaacagtcatcaggagggggcacagttggattctctccagtgaagatgtcaggatggacagaaatgtcagcgtaatccaaagaggacacaaacacccctgctattttcttgtcaccaggaaaaggccagctctaggtttgatgaatgtttagtgaaagaaagtttgcaaaagtagaaaagaaactgacataatggtagccaaacaggctttctctgcattagaagagctaaatatacccttgcatgtctgattagagaaaaacaaaacaaacaagcaaaagctcctccgatgcacagaggtactgctccattgaactagaccagaagagcttgggcctgccccttgggaacaggggtcaacatgatgcggtgggcagggacccatcatctgacaagaagatgccctgagggcaatggaaagcacggtgtgtcgggagaagatggccctgagggcaggtgcattcaggtgcttgtgaacgctgcagcatgttgggtctctagttttgtatcagtcagctactctcacaacaatgctgtgtaacaaaccaccccaaactcagttgcaaacaatgatatttatttctcattctcatgtccacaggtctactggggttcatcccatctgagccaggcctggcttttcttggctgcaagctgagagctgggtccaggtctgctgaaccaaggttctcccatcttccttgagccagtgacaatcagaggcctatttctttcatgacggaaggcaggagaacaagcaggcaagaccagctgtgctagcacatggcacccctttcccacatcacacctgctaacatcccattgttcaaagcaagtaacacaaccaaacccaatatcaacaggacaagaaaacagactccacctctaggtgcacaaactacagagtcacggacagagaacacagatctagggaaggaagctggagaatgagaacaatgaccctcaataacacaacctcccacaggtttccaaatccccaacctgagcatatttccaaggaaacggaatcatgggttcagggttttagagcaagcaatttctgctctcccagcttagtttccatacccttaacacaggggcaatgacgtcgcatcgaatcatatcttataagtctgtgatgatgtttcaacaactgaacgccagaaaagtgcttagagcaaggccaggtaggagggacagaagccaataataatgagtagcatcactgttaacccgcaaaattctgggaatttcctcgaaagtctaattagagaatcatgtccccaacaattaacagttattttgttttttttttctttgaatctgagaaaatactaattgtcacagggtagaatatttatctgatgagcgtatagaagttaagggctctttggagtcacggtgctgggtttgggtctcattcctcctcctacctgcctttctgagccttggttcctcatgtgtagaaggggtacaatcccaacctcatgtgtttgtggcagtcggggttaaatgggctaatgattctgaagtgctccgcgcaggcctggcaggtgctgagcaacctcaggccatagagagagcactgattttggagtcaggagctgggacctcaggtcctattccctggggatccgggaaaagtcccttggcttccctgagcttcatctgccccacgtgctagtgaggtggctggaccagtcaggctaaggacgtccctgcagctatctaacttccccttactccctgttcagcaaagggcaggagctgggcctggccaggctcccacaaagcccaggcgtggccgtgctcagctcacggacgggtgtgggggatgcgtttctgccctcaaaggactgagctccagtttctttcttcactgagtcctttactctctgcctgcgggtggttatttaagacatctcccgcctgcaggggcctcttagagaacaaacagatcgttccttcagctgcagtgcaggctttactgggcttgttcctgcatcaagtagacagatccttcctgaatagagtcgccccacaggccccacacccagagaggggcagccaggagcctccgaggcgggctctgcccagctctgccttgagctctgcctgactgcagagaaggaaagttctcttcttgcaacctcaaatcttccagataagaaccaaacgacatccggcctttgcgttctctccaccagctcccggctcacccacccagcagctcagcacctgcgaaatccgtctcccgatgcacacttgctaaccgcgtgggtgtgagcacaacgatgggaaacagcggaagtccccggagtgcagactcaggagtgaacctgcctgaagagtggcgtctaacgcacacactgtggtcagctccaccccactatgggtcccgggaataggagcaagtatgtattttgcttgcagggcaggtgtttcatccacattattgcaggaacagatgaatttaattaaaagaacaccacagtgggcacctcttccagggatgtctccctctaagaacatgacactgagatgatcaaggttctaaaagggcgatcaaattactctccgaaaatgaaactgctcagacagaatgacaattaaattaataacaaccaagacaatgcccagatttcatctccgctcacagcccctcctgtgtgctgtatgatcaggttcttggggtggctccagatacagcaaacagtcaggattaatccacaagagtgagctgtcagcatgaggttcccctacagtggagcttgccaaggtccgtgcctcccagggcacccgttccagggctaacagatgaagcatggaaatgctgtgtggagtgagctaagcagccgttctcaggagaaaacagacaaatcctcctgcatcctggcaaaccagctttgtggcctgttttatgtcatctttgctgagctccaccgggtcacccctcctgttggctttgtgatactgacatttcaggcactggcacagatacattggccttcctggctgggatttcacggacggagtgagcagtgctggcttggaggagccgtggcggcacagggcctgtgctctcagctgatcaacgccttgatagccaggaaaggcctgtcctaccccaaagggccctcgcagcactgtttgaaattgctcttgccatctttggaatggattcctcagtacatttcagactcgttgttgtgactttggttttaatccagggacacaccgtggccagtggagtgtctcaacagcatctatgatcgctgtttcccagagacagcatctcagataccgatgctgaaagagaaacagcagcctgtccccaagtggcaggaaatagtccattttaatggcaatttcataagtggcagatgatttttattgtaattttctggtgagctgattaagtggaggcagagtcagttctgaggcgtcaatgtctttaacaattcggggagacggaggccacgctcagcaggaacactgagtccatggaaaacaggccctgggcccgctgatgtgcataattccacgtttgcccctcatgtaaccaggatggtaaattacaggtgtcagataatcacgctctggagtggctacttgaggatgcgatcgaccaatttaagctccgtctgacacatgatcaatagcccgtgatgctgcatggaattgcaggcacagtgtccaaacctgcagagcagtggctcccagctggggcaactttgccccccagaggacatttggcaatgtctggatatgtttgcaattgtcacaactaggaaaggaggtacccataggatacacaggaaagtcctcacacagttgtatcctgcccagactgtccgtagagccagggtgagatgctctgacagagccacagtgaacattgcattccatcatctgggtatctccaggaatgtatgtagctggatgtctggcttttcatctgggtttcacgagcctcctgcagaactgaaaccatgtgcaaatcagttctcatacttgctctcctgcctccttcctattgtaattttttcttcccaccttttttattgttactagagaaatgatgaagaaaaagaataggctggagagtcactcaaaattttgttttcctcaattaaaaagaagtaatttagaagttactcaatgatgttttctttaattaaaaaaaaaagtagtttgggaaagcagaaaattaatgaagacagaaaacacaggtttcatgaaaaagttcagcatcccaggaaaggagcaaagagaagtctgcagatgagagttgctcagtgtcaggactcagaaaacaataccccaagataatgttcaaacctgagtgctttgaacaaaggatattgaaagacctcagaagagggcctcagaactcacatgtctctctgaccttctcctgtctctccttcacttccaaagcatgatctttggccaggggatctctctgggattcccttatctgcctgagggatgtacttccaaaagaaatgtgactggcatgacctcctccctaggaatctcttcaaacagccgggaaagactggtcacctgagaggagattggaagtcctcactgcactcagaaaggctgttgtccattcttctagagactttatctgaataacaaggcaacttttgtttaccattcagttcctcccctttcctttctaacttgtcaccacctcccccaaaagcctcaagcctccactcctacaagctataaagacttcaaccatctggcttctccatgagtctcatgttttgtgtggctcttaggcatatgtgcatggtaatacatgtgtatgcctttcctccgggtaatctgtttattgtcagtttaaagcagccacagagttaaagacggaagccttcagaaggctttccctttgcccctgcatccatcacctgagagcccacccatgacagacttgaactatggacagaggctgcagtcaatagagcccagggtgagactgactacaggagaagctgggccttgggggataagcccaagcttctcaattctcaaactgcaggttaagcctctataatggagcctgaattccattcagtgagtcttgaccagcattttaaaatgtgaaataacagaactcagtagaaaatatcaaagggcattacttatagtgaggtaagaatattctgcgaaattttagttttatattgagtgtgtgtgtgtgtgtgtgcacgcgcacgccaggccttgttgtaaaatatacttcttataatgggttgtgttcaaaacagcttgtaaaatatgggagcagatgaaatgatggaggatttggtaagaactaaatatttgtaagcaaattttgcagtgaaaagaacaaggaaattattaattcaagagaaatcaaaagtagtataagaaagaaaatgcaaccatattgccatacttggctctgctgtaaataacatctacttggccacatgacataaatgctgattatgatgatgtcattgaaaacggtaatttagccatgcaggaggctgtgagttatggtggcaagtggaggaagagagctaatccctcctctgggggccggcattgagagatcacagagcaacttgaatccccgtgaagcacttgctcttacaagatttggaagaaacttgcacaaacagtaaagtgtctttacttgtggatgtctctgggaaaagatgggcagggaacagaaagattcaacggtgtttgatttggtgaccatatatctctttaatttaaaaagggatcattcaggaccagtgaggccatggtggtgttcattggaaagagcccagggacccaggtggctcttggctccatcacctagaaccccatgcccttgaacgagtccctctccagcttttgacaccagttggccaacctctaaaacaaagaggccaggccaaattattttgacttgtccttggagccctgtgagtctgtctcaccacggagtgacttgggagtctgggtaccacccaccctgactccatgtcaaataccgtgcacatctcaagcacagtgcctggctcagcacaggcagcaggaaagctgtgtgggtgtgcatcagggttggtggacacagtagacagcctttgctctcccaagatgggggaggtccggtaccatgacttagggaactgctggttcctaaccaacccccccacccaccccggacagtagtgcagaaaggatgctttcctaatcagctaattttcacaaaatgtgggatgccctggtgggatcccgtggtaggagagtagatgacttccaggagcacatagagggggcagaggctgcgggctgacccttgatacccctcatccccttcatttaacattagaaatcccaaagtttagttgcctggaccggaactgaatttcccatcctgccttgcagctggtgtgtaccttcccagtgtacccttaaatgcatgagtacgccccacttacccttttcctcttccctcctgcctgatgtgacttgcacctccttggaccaggtggacaagaaaagcctccgtcaatgacagagcccaagatgggcaggtcgaggatcagccccgggagccgcccaactagctcgcccctcgcccccgccccccagcccccacaatcccccgatggcgaggctgtcatgtgggagaaaagcaaacctctggttcatgaaattgcaggtatttggagcctctgcacaagctagtgaacttgtatatcaataagtagggggagtacattttttatttcaatagttattcactttaatgtgtattagaaaaaaaattccaacttattaatcaaacctgtgatttcattatggcgacagaggacgttaaagtaggtaacacattttttacttttaccatgagtaaaaatgtgagccggtttagtttaaaagaaaacgccagaaaacagcatgggcatgacaagggtttggcaacaatcacgatcatcctggagtgactgaagctcgtccacttgggacaggtgaccatgtgggggactctggagcagcaaagcagtcagggtgaggggtcagaggcaccaaacttcctcttagaaaaacacgagggaaccgacgaacccatgtccagggaatgctgaggacgctcttgactgtagggggaccgagcacaaagcccccgtcgccgcccggcggacccgagctcctggactcagccttgaccgacactgactctgttcccacagcggccgctttgttcgtctcctttgtggacacttagctcagcgcctgtgctgctcggctgtgacctgaccttcgagggtcacctcctgaattcaatcgctgtgacctgtgctgcggaccccgtcaggaagctcctggtctcctccagtccctcccccgcctcattcgcacaaaaggcctcattgttctgcagggtctgattcagacctgccctggtttcagtttcggcaaacacccagcactggctttgggtcaggggtcactctggagtgaacggggcgccctgagcaaccccacatcgctgtgtgatcccggctcatccacaggaagccccggcccagggacccaaatgggtcccagaagtggaccagatgcagcgccgacggtgatgtggggacgccggcatctccaacagtgggaaagaggaaactttctacttttcattaagccccgtcctcttctcccccagggttacggggacacaatgtcttcactggccatgttggaacgttctggggtgtgaagggaacgtccccaagagcagtgacttgaccttcgctttggctgagatttgaaattctcttcttaccgatctttaaatctgtacacgcaggagtctgttttatatccagccgtccctgtgacctcgggcgagttccttaccttgtgtttcctcatctgtaaagtgggaataatgaccgcacggcctcgtgtgcttgtcagaacaaaatcagacaatgcacgaagacccgttggcccggaaagctgcagctgggccctgacgatgccacgctgtccatctggggaggggaagttcattgctaattcgactcaaaggagaaaaatgcatgtccccctgagctgaaagaaggaacgaagccaagtccaccaggccaccgggtctccttaggctgaggaaatggacaaggagggcaacatggaaactgcagagagcagcaaagcccttcactactgctgcccgaaccctgcagcggctcctacagccaccacaggtcactgggccagaagcaagttagggaacagccacatcaccattcagggaagccgctcccaggcgctgatccccggaatggtggatttgctaacagcagccacacagacacctcacctcacgccaggctgctgagctcagcggggggcacgattgcccaagcaggggtggggcagggcaaggcagacccagtcacatggtgggaaaagccaaaaaaaacctgcctgatttggtaaaatgccagaactgggcattttaaagttagtttttaaggcgtagccatttgttgggggtttttttgccttgtactctcctgtctccctcctcgccacacaataaactgtctccaaggcagccgccctcccgttgccaggacgtgcgaggcagggaggtcaggagctctgctgtgagggcgccacccggcttccggtttgtgcatgaaaacccggctcagcttttccgttccatgaagactgggcttctccaggctgctcggtaaataatcacggattccactgggaagagaaaacatccccacagccccttctccattgtgcacccaacctccaggtgttttcagtctctcaaagagccccgacgcctgaaatttaacaactaaaaccttatttttcatttcctgagattctcttggtggaatcaggcagcctggcagtgcgcagcacctagggtggctcatgatgaaaaatccagaggggactttgccttcctgcatgtccttttgtcaccagaacccggggaccagcaggacccaaagctccctgcgggatcagctgggtctgggaatcactgtcctgggcccatttggacttttcggatgaggccggtgtttggccagcacctgggctgggcaggtgggaaggacagaggcgctgatggagagagggaggggaaggggattcacagccgtcctgggagccccacgggtgcctttggcctctggctcctctgcctgcccctcaggctggttaaattcccccctgaaagttccccattgggcaagtccagcaagcctgagccaggcctgtgatctcagggtgggtggagctctagaaggcctggccctcgctcctggagtccacgttcaccctcaaggcagtgaacggcaccccactgcgcatctactcactaaccaggcacgggatggtttccatggttcctgtgtcttagaccagctcgctcatggtgacatgggacacgctgagaccccaccatggtgcagagtgacattaatgcattaaattagcagcctctgcaacacaaacacatttgcatgtggagcctgtgacgttctttggtaaaaggaatccttacatgtttgcaaacattacactcgctgaggaagggcctcgggctctgacaaatgataaatgggaaaattagacgcttcaggaaaatgcaaatatcatccttcgtaagtctgtccgttggcaggaaatttaaaaaaaaaaaaaggtttccccaaagcagtgaggcattacttctcctcttttaaatgccaggaagaagggctgtgattcttttaggcacttgcatggatcttgatttctcttccacagtctccccaacgccctggcaatgtgtaggggagaagcctgtgatttcagcagactgtcctctaattcagcgtttctcaagctttatttcataatcaccccctaaggaatctttataggcaattttttcttacttgcccccctatgaattttaatactacataattactgcagaatggtttatgcactgtgtggacatctacatttttacataaagacaaaaatcttttcacctctgggagccagctctggcccccatgggagcagtattctccgctaagaaggcctgctcccattccttcttttgttgattttgggaggaggtgcaggagctgcctggggccttggggcagagcgattcgggagaggggacagagaggacagagtccggagaggggaggggagggatgaggccgaggagcagccaggagccccgtgtggctggggccagggggagttgagggtagaggagtgatgggtgactacagggcaggggccgggggtggggggcggagatggatcatctcaggccttaggggaccctgtgaggacttcagcttttactctgagggaagtgggagccattagagggtttcagcagagacaggacatggtctggtttattttttaatggatgatctgtgtgaggacaggttggggttgtggggtcagagctggagaaggaggccagcggggtctactgcaatggtccaagcaggagatgatggtggcttggaccagagggtagctgtgagggaggtgggaagtggccgtatccttgatctgttttggaggtagagcactggcacggtttgctaagaagggtatcaccccagagctgtcaaaggctcatcaggtaccccctcttttactggtattaacttcttatcctcccaatgaggctatgaggcagttatgcattctcttaatgggagactgagacacagaaaggctaaatacagtcctcagagattacactaccaagagtcagagtcagggtttgaacttgggcagaggctacactcatgaccaccctgctgtgatacttgggttatttgggatataaaagtgtaaactggagtgctggctacctcctggtcagtctctctgcagtagccattgctttacagagtagccgcaagctttctcaaataccgctgccttaatccttggccagcccctgaatctcaccatttcctccaccaagctgcagcccctttcatctgcgacaccagtgctctgggatccctgcctaagaactcggtctgccttacccagctaaacactccaaccaggtccttggagctaagaaaagtcaaaagcctggatcttagcagtgatcatcaaaatagtaacaaatatagtaaaataaattttaaaatttatttgctttcattttctaagcaaactaaactctgataagatacttcttaactaagaaagatataagctgtggcacaaatcactcatccaatttgtcactaatttgtcggttgtctgtcggtttttaaacattggtggtataatgtgttgtttggcacagccgccactagctaagcaatgctcctatctgaaactaatggatgagggagccacagccacctcttccaaccacctcttgattaaatgaatggtcattaggtccctggcaccgaggagtcattacagacaaggacaggtggctatgccaccagcacatcacagccaagtgcaccctggagtcccaccttcccacaagacccccaccgaagagctcaccctccccttggccctgctgacaacaagcagtggcaaccctcaggctccctcccccctcatgcaaatatccaggctctgcagtagcaaaatgcagacaaattctctttctctaccccagttcggtacaacctattgttgttactcatggtagatatgttctataaagtcacgcaaacactgaattggcaaatactaagccattgctccttcagggttaggtccccatgagcctgtggtcacaatattttcatctactgatcaatacataaccttgttttatgtgtgtttctgtttaaaggcactttatttaatagatgttgtttcattaacattgaactcacggccaacagtgctacaacccatgactgagccaagtttatccaacccacgtttctcccacccgagccttcccaccctttggaacaccagacggcactccagcactactcttgggggccattttagaaagcaaaatcaccccaaaaaaaagcacaaaaatgccaaaaaacatggcactaaatataccatgaaaagatgctcgtttagtttaaaagctaaagcaaggcagagcactgccttgttcaacctcagcatgttctgcgcttccagcagctcaaatattctctgctctgcttctgtttgcaaatgaccacaaaaacctgccaagtattgattttgaggttacaaatcaattttagcaagcaggcaaatttacaaatatggaatctgtgaatattgaggatggactgtatttcactaaggtactggtgcatcctagctgtgtttcagtcctaccaaagatacatttttcccaaggtgctgcctataaagctgccagctagcctctagctttgcccccacacctggtggtggtctgtacttcctgtcttcaccttgtcccttcctacttgagacttactggtatctcctccaggtggtcacccctttgatataattcggatgtttgtcccctccaaatcttgtgttgcaatgttattcccaatgttggaggtggggcctgataggagacgtttgggtgatgggggtggatcactcatgaacgtcttggtgccatcctcatcctcatggtaatgagtgagttctcactcactatgttagtccccctgagaactgattgttaaaaagagcctggcgcctcccgcccctccccttctctcttgctcactctctcaccaagtggcttgccagctccccttgccttccaccatgagtgaaagcttctgtggccctcaccaaaagccaagcagatgctggcaccatgcttcttatacagcctacaggaccatgagccaagtaaagctcttttctttataaattattagattggtgcaaaaggaattgtgcttttgacattaaaattaatggcaaagactgcaattacttttgcaccaacctaatacccagttttgggtattcctttatagcaatgcaagtggactaagacacccttctatgatgagcccctctatccccaccactttgtaccccatgtaaggcttagttaagatgcctcttgtcacgctgaccccatgcctctctttcactgtgtccttctcattgtgcggcccctgatggatttcccattggtcccacactggaccgtgggtccaggaaagcaaaatctacgcgtccccagtttcttgcatgcttctgatgctccataaatgactcataaatactgagtgaacaaatgaatgaattcatcctaaacagtttcatctgtatttggaatatctgcaatactacaaatagtcacccattaggagattcatgggtgggtcttgaccaccatttacaaatgaaatagactaaagaaaatgtaaaatatgaaatgcattgtacaaagtaagagtattatctcttgaaatgttagttctatataactatgttctgggtcactaggtgtgatggttaattttgtattaacttgactgagtcattgggtgcccagagatttggttaaacattatttctggatgtgtctgtgaggttgtttctggatgagattagcatttgaatctgtagactgagtaaagtagtctgttctccccaatgtgagtgggcctcgtcaaattcactgaaggcctgaatagagtaaaaggctgagtaagagagaattcttcgtctttgcatgactgtctctgagatgcaacattggccttcttctgtcttcagactcagattcagactggaactcacacgttagctttcctggttctcacacctttggacctgggctagaacttacactgccagctctcctcactctctagctcatcacctgcagatattggatttcttgagctccattatcacatgaaccaattctttatagtaaatatctttctctctctctctctctctcatatatatatatatatatatatatatatatatatatatatatatacacacacacacacacagacacatacataaatggatatgtataaactaatgggataccttattatacataataataggatatatatatatatatacaattggtttgatatttcttgctggaattcagggtgaaaaatgcctgaaagtcctaactaccctggacctataacagctcacatacttgtgaattgaccttccgtgaagatgataaattttaaatgacaaatgacccacactgagcctgtgtatcaaggtttcttagtaaattagacaaaaatgtgtcccttttggatctgccagggaaaggccccttttcattctgaccagtgaccaaattcaccttaatggccattgagtgagcaaatctctggcctggtctcacttcacaaaataagacaatggattgagctcaggaataaacacctacttttatgttttaatgtcccaatgtatatgattctgtatatcagagcctaaaatctttctagtggattttccttcagtggaaacttgtaataaaattatttcatttgtagggggaaaaagggaaaatgaagcacaatttgagatgatttaaaatgtttctccagctctaggaaacctgctttgttcaacatatttccccagataaagatgccgggacgtagagtattttttctgtttttatgggagtcaaggattagagatttgggagaggtaatgaagagtagaagggctatcagctcttctaccttttttgagtgtgcaggggctatgggagactgggccctcaacccagggtgtgcctggggaagaggcagggatttgtggagctgtgctctaagaagagattgacgagcatggaattttacagcctatactgaggaaaatcagtggaagagttgtaccttataagaaagaacttgcacagttgacattgagagcagaatcatttgtacagtctcgcacggctgcattgccgtatcaggttactggatagatgaagttataatgagattagaataaccaagacactaatatcctgctagttcatgaatatttagtagatcctctcaggccaacatcttaccctgtttgcattctatccctgaaagaatcagagggtaacttgtacctaaaagcccattagagaagattttctatagagatgttgcacttagcctggggattttaagttttggtcttcatggtgtcagattttaagaatcaggaaaaggaatggcctaattttgcctttcaggacttacatagaataaaggaaaaaatctggacaacaaaaacagaaagacgccaggccccatctctctgtgactaaagcgtaaatatttaagctttgctgctctctaactcgggaatcttggactggggaataggccattatctgggttacactttaaaaggctttcctttcttccatccattctggggtccttaatcacagctcaggtctcccttgaggttaccctgtgcactggtctcaaaagttcattcccaaagtgctgacctctcaggggagacccttcactgtcagggtgggctttcaaagggaggcatcagtgcttgccctgagacgtgaggcctactgtgccctgggcctgacggtgtgatggcctgaacattgctggcctccagccaggtcttttctgagacgcctgtgctcttgccaaacagttgttaaaagtcttgaatctcaattcccactttcagggtctccaaggtcttatacattttaactccaaagtatttactgagccctactccatccaagacacagctgcaggtcccaaaaatacactgggcagcaaaacagacccagcctcacccgtcatggagttcagagtccagtagaagagacgtaccaaataatcgcaaaaacaaagagattatttcaaccatcgtgagtgttgggaaggaaagagacagagagttatgggaacctagaatgggaggagacagacctacacaggaggtcagggtcagcttgcctgaggagggagatctgatgggcgcctataagttaactaggcaaagacaaagatcacagaggtgtggaagggtgaagagggagcttccagcagtggaaactgcgtttgcgaaggccccatggcaggagcgggcaagacagggtggatgtcagggactgaagggagcctgtctgggtggagaagagacggtaaggctgagaatggtgagggtgaggccagaccacccaggccttgctgtccatgttaaatattcacctttcacagaatggtaagggaaagccattaagtatgttaagcagaggtcagaaagtaggtgagggtgggagggggaagagcagggaggctggaggtttactcagcaaatacttcttgagcatctaggatgaggcaggggtcagaagtgagccaaaagcttccctttgcagaggtcatgttgtagtggaaggaggtgcacatttatcaaccagatgcctaagtgtagtgaggacgtgacagggtgctatgcaggaaaataaagcaggaagaaagttaagagtgaatgcaaccggggtgcatgctgagggtccagagaagacctcgctgagaaggtgacctttgagtagagacttaggtgagccttgcatatgtctggtggaagggcactccaggaaccgggaatagcaaaggcaaagggccctgagtcaggagcacgtctgccagatgccaggaacagcaggcaggccagtgcaaatggagctcaagagcaaagggaaaggaatagcaggtgggatcagggaggtgacagggaacctgggcatgagaatgttggtctgttgaaagggcttggggttttattctgaaataggagccacaagagggtcctgaggagggataaggtctgccgcaggttctaagtggattccactggctgcagatggagaaaggactgtggatgggaggcatgggctggggcagggagaccagcagggaggccaggtggaggtgatagtggcctgagccaggtggtcagagtgatgggggtgaggggctctgatgctgcccatcttgcaggtagagctggcaggatttgctggcagatgagaagtggagtggggaagaaagagaggagtagaggatgactcccaggtgatggcctgagagctgggagagtggggctgccatttagagatggggaagactgaggaaggactgtgctcagataaagcccctctgccaactgcaagagacacagggcagcagggacagagtgacggagttaggagatgtgtcacagtcctccaaggaagaacatgtctctctggaatttgttggtctgatgatctgctttttgctgaaatgaccaggctaatggtgttttcgggacctgctgttaaccatggagctgggtcgtgagctgtatatagtttataaaaataattcaaccttcctgtatcctatgacacattttatatcagagaatcataaaaaatcctttttattgaaaaattttgtttaataaatggggcacatgttatcacttagccaaatcaattatctcctccagacatttgtatctttatgaaaagacagacttcttttgactttaatggcgatgatgtcatctcacctgcagcaatagcgcaattttaggcatttggagaaagaggaaagaagaaaagacaaataacagaagtggtaggattttcacaaagatagtcatacattcactaggaattcagcctagagcctagtcactttgtgaccaagaagtgggtcataacactaatttgatgagtttgaaccaacactttaaacaattagagagcataaatggattggaaactatcagggcgcattacatagagtaaggccatgtgttatcttgtacaaatttcattttgatttgtgtaggcatttgtgtgtgtgtgtgcgtgtgcacatgcgcgcgtgcgctggtgcatgtatgcatactggggtcaatgtaaaatgtatttcttttattgtaggtcattcttcaaaatgtttgaaagtcaccagactagaaacccttgatagttcatgagaggttcttctacaatgggctgtgcccttctccgttagagagagggttagctttaccaagtaatagtgctggctttttctgtgctaaagaaaaggcattgagctgatttattccattccagaaagttcccataatctaagaggcaagcaggcaaaactaacggcaaatttctccaaagtggtgcctttttcagtagtgattttcaaagcaagatgttggcatgacagttgctgagactatcatgaaaaatgttagcagaggcagtgaaaaatgtaggacccatcatgagacaccgagagaaggccctaacagactacatcctttaggtaggttcagcccttccgtaatctacaaggccctggccccacctccagccaggtcacaccctagcttggccaccccgccccttccgcccccacccttccccggcctgaccccgcccacagcttggctcctcccccatggcccagcctcctagactgaccccgcctcctcgctggccacacccctaaccggtcccacccctagcctggcaaacacatttttagctaaagtagaccctgccagttttccaaagggctcagagggcacttcagtctcctctttctgtacagatgaaacctggtaggaatgcttgcatttccgccccagccgcctcctttcctgacgccccggaggcctcctcgtagtgtatttgggacaggcagactccgcatcactcagtagatacctaccgagatctactctgtgctcaagatccaggtcccggccccagcggtgaaggaagcgggcaaagccccctccctctgaggtgacgtctccagggctggtcacagggactccagggccacgagcacgtgggtgaccactccgcggattatcccacctcagtcgtaagctcgtggggcccctcccagctttctgggtggtttctgtccccttgaggcgatttacaacccaagtccagagagcgagaggttgatggggggcctggcccgcccctatctcagggaggcaggaactgcttagagctccgtgcgcgtgggacccatggctctgacaaagtcttggacaaacactgcttcccgatccttctcacccggtcgcctcctgcctacagcatctgcggacgctcagccccaagagatgcgagctgctcggggaccgccctgagtttctgagagtcctggggcgatggcacctgggtcctgtgcagatggcactggggagtctcgaaggcttcgactcgggctgagcgtgggggtgggcgcgggggatgctcagtcctgaccccaccaccgcggcccggaggacataagacgggggctgtgtcccctcagaaagagacagcaggtcccgctgtgtgcccacgctgggaagagacggtccagcctccaccaagtggaaacctgagcccagaggaatggccctgccccttccgctcgacctggccagtcctgtctgtgggtttccattgtcagccatgaaggggaattgagactcacaggtggggttaagccgagtgacgggaaggttaattctggatgcacagggaatctgaagatggaattgtgaaacattcatggatttgccccagtattccagccaaccatgcctgtgtgggtgtgtgtggggtgtgtgtgtgggggggtatgtgtgatgtgtgtgtgtgtgtgtgtgtggtgtgtgtggcatgtgggtgtgtgtggtgtggcgtgtgggggggtatgtgtgatgtatgtgtgtgtgtggtgtgtgtgtgggggagtatgtgtgacgtatgtgtgtggtgtgtgtggggggtatgtgtgatgtatgtgtgtggtgtgtgtgtggcatgtgggtgtgtgtgtggcgtgtgggtgtgtgtgtgtggaggggtatgtgtgattgtgtgtggtgtatgagtgtgtggcttgtgggtgtgagtgtgtggcatgtgggggtgtgtgtggtgtgtgtgtggtgtgggaggaagtgtgtgatgtgtggatgtgtgtggtgtgtggcggggagtgtgtggtgtgtgtgtgtgtgtgtggcgggggggtgtgtgttggggttgactgtgtatagttccctgattaatgattcctgcctcctagcctgattcaacggatggagccaaatggcctagtggttaagaacatggtctctggagccaaactgccccactaagcaggtgccttgagcactctgcctcagcttccccatctgtagcatggggagcttagtaatagtgctgtgtctcattgggttggtgtgaggactaagtgagatcatagatacagggcatggggaatagtgcccggcgtgtgccagctcccaccactctgcaaagaggacacgtcctacctccccatagccaactcacacccagcagctcctgcatggacgtggtgctattctctggggacctgcatgcacctgacttcagcctggccttcaggggtcattctccgggtgaacacaacctggttcatatgtaaaggaattttagccctaagaaggtgtctgctaggtccccactgatgagcaccccagacggagtgatctcaggtcaaacgtccctttcagaagagaatgtggcaggaacaagaaagatttcaaatgcttatgccctggacccagcacctccccctctccagctgtgccctggaggatcctccacccacgtccatgaggagacgtggacctgcagggctgtttgtaatggcagaaaattggaacccaccagaacgcccatcaacacagaggggccaaagccaaccctggtggagcctccccaaggaacactgggcacagtgaggaatgaggcagaacctcatgcacagccatcgacggggtctgggctgcccggtgtgaaaaggcaaaatgcaggaggatgcaaacaatgtctacattcacccacataaacacacacacatatggacctagacataaattcacccatataaacacacacacggacatagacataaattcacccatataaacacacacacatatggacacagacatacatgtatttcaaaacccctcaagagcattctatataatacatgagatggactggaacacttatataaatacatcaactgcccgaaagcctctagagtccactccaagcccaggctgcacagacctggccctgcccagctgttctctgatccccacttctcctgtcctccctgccctgctcctgccattccccaagtgccacccaccagccaccatgccctggaaatgcagcatgttcccgctttaggctgctgctcctgctgtcccctctgggggaccagtcctcctccaggtgacccatgacaacctccttctgctcagatgccacctcctgccagaggcctcccctgaccaccaccaccagtccccacccaggttccttccatttcttactctgctctgtattttacttatcatctgcctcattctcggcagaatgtacactccttggaggtgatggagtggcacacagtaggtacttaataagcatttgttgaattaatttctatatcttatctgagtaaccacatagacgactgcataggaaaagcctctgagaggactcatgcccaacccagcagtgatgatctgtgggcaggctggtagcctgggggagatcaatggagacctgagcttgtctttaatgtcttggttttcttacagggaaatacacttatgtattaattgtgtcatgaaaattaattttaatttaaaaatcaatttcatgcaatatcgatttcacaataaagaaatagatttttttagtttccttgatggagatatttgacaccaggcacttcgtcattcagaaagaaccagcttcacagtaaacaaattttggtgccttaataacaagatcagcaacagctacaatgcctgctcctcctgctaacagttacgcagggctttgctcataccaaagctttgcctctcacgacctctttcggtcctcaggacaatgaggcaaagttggaagaagattatgactgtttctcttttgctgaaggaggtggagtgactttctccctgcaatgggttcctattgaaggattacagcaacaattcaccaggctcttcttcacctgaccctgaatctcacagcccagtagcccgtagccctgaccctgcccccagccccagcagtgggctgtgactggcctgatgcagtcaggtcagctcttcccactctctgaccttgactgattcaagaatgggcacctggcccaagggggccagtgaaaggtaagatgttgcctgggctccctggcttttccatggtttgctctgggtaagttggacgggatgcagctcttagaaccactgcagccttctctgctgccatgagagaagacagtctgaaagcatgacccatgagagaggaaggaaccaagagaacttgagggaaactgagccacagcctgatccaatcattcctgatggtgtttatctctgggatttttgaaggcttgagcccacaaatttccctgttggtcacacctgttcccactaaattttctgttccctgcagccatagctctctatctgattctgactctcgtgtcgcatgatagtaaggggtagattattaaactaaggccttccctggctggctctttgtgtgtaatacacaccttctcacagccaacctggttctttacatctaaacttcagagtcagacgagagaccctagaggtcatctagtgcagccccttagtgtaacccctgagcaaagtgaggcctgggaagaagtcgtgagcctggatcacagggctggactttctatccccgattgctcctgtttttaggttaacatgatctaagagaccacctgtgacaagacaacctgagcttcatgtgtcaatgcaaactctgtatctgcacacccaaaatgaagcaaagtctgtatctgcaaacccaaaatgaagcaaagtctgtatctgcacgcccaaaatgaagcaaagtctgtatctgcacgcccgaaatgaagcaaagtctgtatctgcacgcccgaaatgaagcaaagtctgtatctgcacgcccaaaatgaagcaaagtctgtatctgcatgcccaaaatgaaggaaagtctgtatctgcacgcccaaaatgaagtggcaaacaatggcagttgtagatcaatcagtgataaaacctctctgtcccaagtatctggatataaacgtacttttgcttttctttgaaaaattagatgacagggccttttttgtaattgatactgtttcttgggtatagattttcagtgtcaccttaagtgcatatttctatcaagaaataaaaatacaaaatcttaaaacagagcaaagaagaaatgtgaaataataacatccatttcattctgcccccactccctttggactctctgactatgctgaggtttggttttcattttatttattttaataatttcttctttcctaacttttcctaaaataagaacgcatagactgagatatacattctcctggttttctaaagcatgactatgagagatgtatcctaaattggaacttttttctacatggtcgcatccaagggtgaagaaggcaggagccagacatattacagctttgttgagcacagtggcagtgtgcaagtgagaacaggctctcagagtttcacctggtggaaaatgtttatcaaggtaatagcagacccgtcaagactgtgttactcttgcagtgacagatttttatggtaaaaatgactgcaattttaggccactgtaaaatgtctttggtttgtgctgagctacagacagtaagagcttatgtgatagatactcattatctgccatccttccaaggaattttcacattgacttacttcctacaatcccatcagaacagtttaatacaaaagcaatttttatagtctggtgattgggagaagtcatcttgttaatcaatttttacctgataagataatgatgcaaaacacattttaagagaaattttagagaaatcacccatgtggttgtagttacagcagatttgagaatgggagctttggaatcagggatatgggtgttcgaatcctggctctaccatgtacctacccatgtgaccctagggagggtacttacttaaggacatcactcacttgacaatgtcacgtaactgaagaggtcacttacctgagaggtcgcttcccttcgctgaaccaatcctctcatttcaaggattgttgggaaagctcaaagtcaatatatcttaagaccttgcttctcaatgtatagtctgtaaaccagcagcctcttcatcacctagaggcttatcaaaaatgcagagtttgggattccatccaaatcctaccgaatgggaattcgagtttagcaagacccccaggtggtttgtgagcaaattaaagtgtgagaagcactgccttaaagcactttgcatgttgctaggtgaatggcagggactcaacatagtctggctattggtataggttcttattgtgtgtgacagctaattttgggtcaacttgactgagccaggggatgcccagatatctgattaaacattatttctgggtatgtttgtgaggatttttctgagagaaattagcatttgaattagtagactgagcatagaggcagaacctccccactgtgggggagcaacattcaacccactgaggatgactgaatagaacgaaagggcttagaaaggttgaattctggctgggtgcaggggctcatgcttgtaattccaggactttgggagtccaaggcaggaagatcacttgaggccaggactatgagaacagcctgggcaacatagggagaccccatctctacaaaaaataaacttaaaaaacaaatcagcgaagtatggtggtgcacacatacagtctcagctgcttgggaggctgaagtgggaggatcacttgagcccagaaatttgagactacattgagctatgatcacaccactacactccagcctgggcaaaagagcaagaccccatctctaaacaagaaagaaagaaaagggagagaggagggaagtaaaagaaggaaggaaggaaagaaggaaggaaggggaaggagggagggaaggaaggaagagaaggagggggtaggggagaggaggggaaggaggaaggaaggaagtggaaggagggagggaaggaaggaaggaagggaaggagggggcagggaagaggaggggaaggaggaaaggagtgaggggagggagagaaggaaggaaggaaggaaggaagggagggagggactggattatctctgcctctctgcctgactgcttgagctgaaatgagtctctgaccttcagacttgaactgccatctaccaaatcactggctttcctaggtccctagcttgcaaatgagagatcataggacttctcagtctccataactgtgcaagccagtttttaattttatgtatattaatctcctattggttacttctcctttaaaatatttttgtgcagtcttacagttttcatagacgttcacactacacattcaacatggagttatttttaattgtctccataacagtccgctgagcagttatattaccaaaacatcagggtttggactaggtcctgctgctcatcacacagaaagccaagcactgagatgaaaagtattgccaaggaagaaggctttaatcagctggggcccccaaggaggtgggagcttatcctcaaatccatctccctaactgactaaaatcaggtgtttttatagcaggcaagaaatgtaacaatgtgcaagaaaacaggaacttggaaggggcaagaaagcaatcatggtggatgaggggtcctgcagtgatctggtttcagtcctttggaactttttgtgagaggcctaaaggtcatttcctgaggaaagaactcagatgaaacaaacataagtttcaagctttttaagaccagagggccaatgtctatgtgtatcaaaaagaactgtctatggggcaattgggttggtttcagttataccatactttattctcctattccctatcttgattgtttccagaattttgctactagaaaatagcatgtgagtgagcatccttctaaatacagctctccttctgaagggaaaaacaaatgaaagacaaacaagcaaacaacaggaaaaaaaggagagaaaaaggaaaaaaaaatcatgtatccatccctttgggggttgaatgtcttctttaatcaggggtttatacagcagggaataaatgtaaccatgtgtgggaaaacaggaattagggaagaagagttggtcaacaagaggcaggtggtcagcagtcgtgatgggtgagggatctggtgtctctcattgtccagatacagtgatctggtgagtttcagtttcttgatgctatgtgggaggactgatggctgctttcttgagaaaggaactcagataagacaaatgtaactttctcaagttgagactgggagggtcaatttctatgtttactcaaaagaaaccataaacatcagttctatgggacaattgggctggttttcgggacaattaccccaccaagtacaggcgcaaagctgcagggaacacaggatgcaaccggaggagggactggtctcacctccatggctctgatgcctcattatcacctccaagcaggagccctgctaggcctctcccacagccataggaggccctggagagccctggtcttagtgcccctcaccattctctgtccctggtcaccaaggactggccaagaccaagtggactgcaccctctgccacccccacgcaggtgcctgctgccctgagctgcttccctgatgggcagccatggggcttccccctcttcagagccactgcagacaaaagctctcactgcccagagcatgtgttctagaactcaaacaagtaaatgactgagaaactgagtatgtgcaggggtggctgggttgtgggacaaggcaggcagggaggggatggaggatgggaagggcacttgggctcggggagtgggaggggtcaaaggtctcagggagagtgggggatcctcatgcctcagagctggggaagaccgtagtggggatgagggaggacttgggtcctgggcctccttggctgcctggggataaaggggagatgggaacagccggccagttcccagggaagcaatggtagggctgcggctatgagcaaaccagggaactgggtcttgcagcggcgcagagctctggcatctcttccgtcccgtccctgggccaggcctagaggagactggtccgtagcatggtccatggtgttgctgcccctgtggagtttcaggagccccaagggctgcccaggggccaaagcatctcctgtgacctgcccccacccagcaaagggagaacctgggatccccctcttctgaaacagtctttccagaggcagctgcagcttctcatctcacagaggcagcatcactcagaacccccagaaaggccactgattaaatgccacggaggagagtggtgatggggtctgtggacggcagctcagagccagagacaggaccgggtgatggatggccccaggccccgccgctccctgcccagtgcgtattctgggtacaagggtaattaagagaagtgtttcttttttacagccaggtgcctttccctcaggtgctgaggtggttagagattaaaacatcatgaacagaatatggagtcacagagaaagagcagccaatgagcccagcttccaggagggtcacgggaggaggtagagccgcaccgtaggttacacaatggccacccagagacacaagtcctcatccttgcaacctgtacatgcaaccttgcttgtcaaaagggtttgcagatgtcatgaagttaaggactttgacatggaaggattgcgctagatcacccaggtggcccctaaatgctatcgcaagagtccttatgggaaacaggcagagggagatgacacagacgcacagaggaggaaggggcagagactggagcgatgcagtcacaagcccgagaagtgggaggaggtgagggaccgagtcgcctggggagcccctggagggaacacagccctgggattttggacttctggcctccagaactgtgggagaacgaatttctattgttttaaggcaccaactgagtgggaacttgttctagcagccctaggaagctgatgcaagagtggggagaagaagctgcctttattcagcctaactcacggacaaagcgggaacagaaatcccacacatcatttccttgttgctgaggaacggctttgctgcccagagcccttggtgacttacaactcctcgaggtggactgatgggcagagaaggctactgagacagagaaaaaacataaaacaaaacagggatttgtcaaggccctttggtatttaaccacaaaagagatataaacagccaagggcctagattcactttgaaggctcagtaagtgggccttcagctaagacaggcttctgtccatcaatccatccttcatttgctgagcaggtattgtgccaggcacttttctaggtcctagaatacagctctgaccaggacagacctggcccgggccctcagagggtgagtgttctggtaaaggaggcacaataaacaaggaaataaaaaacaagattgaagagggtgaaactgctctacaggaaacaaactgggaattgaaagagcaaagggaagaaaggccacattggatggggaggtgaggacggcctctctgaagaggtgagctttgagctcaagctgagcactgagaagattccagcccagtaacagctatcaggagatcacgccaggtcaaggacacagcaggtgccaaggcctggaggcaggactgggctggacaagtccagggaacagagaggatgccaggactgaggacgtagggagagcaggttgcagggatgcagaaagcggtgcggggtgtggatcaggcagagcctcctgggacagggtaagctcttctggggttcacgggagcagtgggaggtgattggagtttatatggtgggggtgcagcacagctggtgcacatgtctggacagccactgactggctgctgggagggaatggaggattagggcaagagtggaaaccgtgggtccaggctgaatccagacctacaagatgcgagaccttgtgcaaatgcgtctttcctgagcctcaggtcctcgtctgtgaatgagggaatcatgagccatcctgaggctgatctgaggatgtaacaagaaggcgcccaaggcagagcccagcacacagggtcagtgtctttccataacaataatgagtgaaccttgaccttcctagtctcacacctgtgacccaggagataactcaggccaaaataacgcgccctcgggttgccccatgggtgtgcttgtgtagacctggccccttcatcggttcggcgttcattctgtctagactgttagggtttcttcacatactgagaacacggtcctggtatcgggaccgcaggttctaattcacatctcacctgggaatggcagggcagttcattaaagtgactcaacctagagcagagctgttagggaatgaggtggtaaggcttaagagcaaacacttgccttgctagttcagcaagaatccaggaaatcttcttgaagcacatattttcccttgctcagagttttcaaaccccaggctgggtttaatggtgtgggatataatggggtttctctttaaatactctgatcaatcttttatcctttaattcatagtactccctcccccaccttttcttctttttcctttttgcctttgtttgttagatgcccaggcacgcctcagtaccaagcgttatcagtaccagctcacattcctttccttacacggaaaggggactaactttctagctcattacagacacccccttcccctttctctccactttcttttacatacccaccctatctaaaaaaaaaatcaaatgtttagccaaccgggattagtttagattgtacaacccgaccccagccaatggggaaagggtacaggggcaggacttgcctcaggaataaaggctctcgtgccatttgttcagatgtgttctcatggcaactggccaaggaggcactcctctgcgcagaagtaaaattgctttgctaagaatcttttgttcaagtgttcaatttccttaggattttgagcgttgttcctaacaacggaaaccatgatctcttccccaagattgctcagaggtatccacttgtccttccaggtagagggaataaaatgggccaccatgaggcagcaggcagacaaattcagacaaattccaggttggctgaagcattcaaagctaaatccagaattcacgaaccttattccgcaccaaccatctgattgcttcaagattctttgaacagctggctgccagggattctgggtaagtgtagcaccccagaggcaactgctcctgggaattcaacaagcagcgacatgaaaagtaaaatgagggagaagggatcactgtcaaccaaagagacactagagacttaacaaccagatgccatgtggcccttgttgaatcttgattgacaaaaagcaacaggaaaaagacatttgggagacaactggagaaattcgaacatggactgaatgttagacaattatggggaattatttttaattttgttggaggtgataaagatattgcagctatgttagaaaacatccacgtgaggtctggggtttgccttaaaataagttggcaggaagaagggagagagctcgaaggaaggagcaaaccctgataactgtgagcctgtgtgatgggtgtatggtggttcacaatgttcttccggttgagatatccagagtaattctttaattgtattcagtttatttttcaagattgcaatttctttgagaaagtgttgctgaatattgcaaaaggtagcccggggattgccattgtgtcttttttgctactgcccatgtagccaggtatgaacagggcatttcgcatgggcatgaggcggggactgtaaaatattactacctgttcaggagacatggctccctgcaacccccggccaagtcctggatgccaggacgggatttcatgtgcacgccatctgaagctaccagcttgctcactacacaagtcgacagactgatgtgactgtatgcagcgctgagcacaacagccggggcctgtcacccagctcaccagcagagagccaggggtgttttcaagcagaaataatgggccactgtggctttttaaagagatatgatttatctctgggaccgcatccaggctagagctgctggaggacaatgacaggctcctgggccagcgaggaggctttcacaccttggcttgtctgcagacggaggacagctggggcttcgcaggctgaggcacccaggggttgtggtgatcagcagggggcacagagaagcagccaactctgcaccctgaggagggtggagatttggagaatttctgttggatttgaaccacacgacggttccttggaggaaccgggagtccaggtggaatctttgcaggcagggtcatgtggtttggccgccttcattactcaaaagcaggaatctgtgtttgggaagatgtgaattacgtacttttgattgaaaacagctgcacacccacaaatccctttagccagttaattggaccatgacaggcactccagatgtctacccacatgcccttttcttaccaacaagaccctgatgatcacgcgctccctggatggtgcccagctctctggctgctcatccttgtgtgacacagctctagccagtggtgggggggtgcgggaaggagggggttgcagaacaggcggctactagggattctgggtaagtgtggccttctatttaagccccttcctcctctcacctcctcctttctcctctcctggctgaaggcagacaggaggccaagagcggcagcaccagcagccacaggaggcctcaaggtgaaggcaccagctgaggatggtggcagaaaggcagaagaagccaggctctgggcgatatcctgcggccccagacttcccctggaccctctgcccctggacctgagaatctggaataaggcaacgtccccccggagatgccaccatgcctgggcttctgttgctttgagctgagcacagccctgggtgatggagagagacagtagtggtcaccctacccagcaaccacctgcacaggtatacattccaggtcggctgaagcactcaaagctaaatccagaattcacaagccttcttccacaccaaccatcctattccttcaagattctttggacatgtggctgggaatcaccggggacccatccccttccacccaggaatctgtctgcctcctgctgcctttcatggcacccgggctaggcccagactttgcttcaagaatgaagctggcacccatagtagggagaagccaggcagcaggagcaggcacttccgagcctgcgatggcaggagggcctccctgggtccccaagagtgcagggatgcccgagtctgcagccagggtttgggtgactgcagctgtacctggagggggctggggggcgggttgcaggtggtgaggctcctgcctgctgcatggagcaggaggcccgggtctgcagcgacagtttgggcagctgcagctgcacctggaaaggcagggctcctgcctgctcccagcccccaaagagcacagggaggctcagatctgcagccatgacttgggctggtgcaacccctcacaggagggtggggctcctgcgcgctctgtggagtgggaagcccaggcctgcagccgtggtatgaatggctgcagcggcacctggggagctcctgccccagcttggaaggggcagggctcccacttgtccccagctcctgtcaactccatggagcggtcaaccccggctgcacctccctgctacagctggtgtgatggcagtggcaggccatctggagaggctgctgccatcagttgaggctgaaacttcatcggccccttgggaaacctccagcctcccagaaaccaagagaacatttctgcctgctgagtttcccaccacgaccatcctctgtgggcctttcccacctccacgtggggccatttccttcagcctaattcactgggctgtcagggaactgcagctggagttggctttgctcacttctggccaggagaacacattctggtctgttttaacacctaaatgacacacgtatgccctgcgtaatgcagaaatggaaagttcctatttgcagagggaatcgtaggcatctttgtgagcttttgttcaaagtaaacaaacctccagcaggagctccttgctgggaggtcagactctgttgctgcagctgctttgagggcccccaagcaagaaggaattctcctagcagatgacctttgaactcaacagcaactctgccctgggtctccagcctgctggcctaacctgcagattttggacttaccgagcctctacaatcatgtgagccaattccttaaatttctctctctctctccacgtgcacacacacacacacacacgcatgcatatatatatacatttccctttagttctgtttctctgaagaacattgattaataaatacactcactttcagtatggacataatcacatgtgccctgcataggttttggagctgatgtcacaagaacaaaattatatatatgtgctttgttagtagtcatattaatcattattactctaaccttggattaaatattaatttgataattagtactctgatctcacattttcctgccagctttatcaattattgacacaggactgggttcacatcagaggaccccaaatccttcagagacatcagggttaaggtctcaagaggaagcagagttcaccccctatggttcaaatcagatatgaatgaagggaccctttgcagaggggcagtcagggctaaagaatgaattgggaagttgaggcacacagagattagcagcagtcagaagctgttaccatccccggggaggatgggacaaggagaagaagcagccacccacctgaccaatcatcagggaaggacagagggaccctgagagacaggatgctgaagcagggggccaggaaagaaagagcgccccccctttgttgctcctctgccccctctcctcctgctggtgtctcccattgactgaaactgacccaaagccacaggccgagggagcctggcaggggcctgcaggacagaccctgggcacagagcaggcagagctgaggatggctgtcaggggtgagaggtgccgggaggggagcatgactgcccagtgcagggccgggaaggccactccagaatgagccagcaggaggaacatcgaccgtgggtccccaagggaagggcctccctcgaggtctggaggagtgaccgactctgctagggagctgcaccagtaatcaggaaaaatgatgtcctacctcagcttccctttgctttttccagacagcctgaaaggctgcagagacgggaggaggtgttcaaacaggcatggccaggtgagccagcagacagttcccctctgtggctgctctggcaacacctgggggtggcctcaaagcagcctcgggctctgaacccctagccttgctccaagaccagctcagggagaccagagagcaaggaacatgcagcacagagcaggtcgcagaagcagcaccaagcaagcccagctgcaggtcacccgggagcctccggtccccatcccacgtggcctggcctgcttgctcctcactctcaccaactcttccctttctctgaggaggaggaacctgggccttgggctcagaaggcgggccctgcacttccctctgagcattcccatctctggcaaaatcgcccattacatgcagaggtattgctaatgggcctcctagtcccacagggcatcacctctgagcctctgccaggaggccgggcaccgcctggcatccctgagggcccttccaggtgcttatcgcttccctcctgcgtgggagtgaacaggacccacagcctctgccccagccactttaacaatgagatcgcacagtcctgggaagcgctgagacctggtctgagacgatcagatgctccgtgaatttctcgtcaccctctccgtcaccccctgctatgcgcccctgttgtcatcctgcagaccccagaacatgcaaggaggatctttccacacaaaagtcatttctgcgtacagtttacctgctgttctgtcactcgttgggagaaagactgtcagagcctaacagctctttaaggccagcatatttatgtcaaaaccaatcctgaagccccaggtcaaattcacagtcaaatggaaaaagtgggaagaaagagttttagcacctatcacagacctcccaggagccacgttctgtgctcgaggcttcgctgacattaagttgaatcaaatgaaattgattttacaggtcataatagttacatatgagcaactttacatggtcctcctaatattgtctcctgactcctcgaaaaacacttccaacttcactcactcatgcagtggatatttatggaacatctaccaagtgccaggcctgtgctggtgccagagatgggggagtgactgggatgggcacggcccttgtcctcacaaggctcacagttgaggagggaggcaatcaagggaccatctgcccaggcgatcctgatgctacaaatgcacttactgcttttctcctggtagaatcccacaatggtcaaagcccagaagacctcacttggctgtggacaagaagctggatcttataaaccttgatgactaaaggtagtgctataatagactatggtcaggactgtagagcatgggggacagggaaggggatttcagggcaagatgcagaatagcgttgagaagccaattcctcatcaagtgctgtgggtgtacaacactcttgtctaagctgagtggaaggggaaagagaggctcaagttattaaaactgtcaagttgaccaacagaagaatttaaaatggtaatgtccttaatacatctcaggatggggaaagaaaggtgagctgccacaaaggagctaaaatgttcatttttcatcatgagagcgctgacgtatgttatctaaagatgacaaagctagaactaggttgtctgagcatattatctagaatattggcaatgaccaccagaaaggctagaactagaagttacaagggaatcaatgcctgggaaagaggaagaatttcacttttcattgattgccatgcttctctgtgtggttgtgtttttttttttgttgtttgttttgttttttgttttgttttgttttgttttgagacagagtctccttctgtcacccaggctggagtgcagtggtgcggtctcagctcactgcaacctctgcctccagggttcaagcgatcctcatgccttagcctcccaagtagctgggattataagcacgtgccactgcatccggctaatttttgtatttttagtagagatggggtttcaccatgttggccaagcttgtctcgaactcctgacctcagctgatctgcccacctcggcttcccaaagtgctggaattacaggcatgagccaccatgcccggcctgtgtgatttttaaagtaagcatgtatttgatagttttataattgaaaaacaaattaaaagtaataatgctctaagtaaatgtgcacaacttacatagagtatgtacaaaagtacaagaagtgggtaattttactctctggggatcctagtttccacccccactgcccctactccccagagatcaccatgagcagtggcatccgatgggataaatgggatgacagagaaacacggctctgtccttccacaagcatttatcccgtgggtgctctgagccatgcgttgcactaagccctgtgtggtgagcaaaatgaatgggaaatagctctttctggggctttaccatcgtatagttcacagcactgcaaaaatgatcacaaacgtcaaagttcttccttctagttattcaggcgatgcaggaattcctccacacatcccaccaagcatcattcacctcttgattaccaccagtgacagtgagctcacttccttcccagggagctccaatcatcattagagttcagttagaaagttcttccttgtgttgaaaagaagcccaggtccccacaactaggcagcggctgagaggtactaagggaggttttagacctaagtatgatttccatttccctccccaagctaccctcagataatcctagaatctatctccagcaagagtgcttagtacaaagggagcttccacgaccctgtggagcccccttcaatgggactgtccccctgagccccaggagagaaatgtcggcatccacactgcctgaaacttccagccatcatttgggctttgagaactgcaaccctctggtgggtgtagactttcttgagctacaatccagcctctcctgatcatagcatccctcatcctgtatctaggatgctagagcagccctgcctagcagggctgcagtcttaagtgatggatacaaggttggccgggagcccagagtgcagacaggtgttgagccctgagcttcctttgcagtgccttcctcttccacataaaggctgtgtctgtccttcaggtgtctctcctccacccattacaggcagccgggcttctttctgactcggggatcactgggtagttttcagcagctcggcctgatgcatggctcatgaaccctgtgttcatcagagtgcacaccttccattacgaacacacccctccagggggcctgacggcctgtctttggggatgtggtccctggagctcaagccagttaggagctgtctgggcctttagtgattgctcagcttccctaatccctagggaagggcagggctcctgcagattagacccagggctttttctgatatttctgtccaggattagaggccacaggcaaggccagggaaggcaaaggagggagaccctgggctgcttttgagaccctgaggcaatgggttgggggttcatcactgccctggagcaggaaccacgaggtgatttggaagacaagggggtagagggtggggcaggaagtcagggggcaggggttctaaccctggggggacagaggaggcttcttcatggggggagggagagaagagccttgggtcctgatgggcaagaccaaacttcaaaccctaaactgtgctctctctgcccccacatcgttcctgaatctgcccctacctgaaaacaggcagctacaaggggctggggcccagcctttgcctgccttgtggtcgcccttcctggggtgtcgctctcctccaggtggcccagtatggcttgccacccggtctgcattccagccagtgggtgggggaaggaaggagacactcgtgttgcaggatgcgcctggacgtcagacccatcccttctctttccatcctattgaccagaactgagtccagggggccaccccaggatgagggatgccagagaaggtggacttcattctgggcagcctgaggttctgttgatatcaaagaagagagcaggagcgttgagtaacagttagacgtgtctacaaagagacatgtggctagataaagtatctcattctcgggccacctaggccttgcaaagctcaaggaaaaattaaaacgaagcatttccacatctgtagaaatggtccagccatttccacatttgcttcctactggggcccatgcagaagctgggtccttgaaaccctgctgaaacaccctctgagtcacacatgctggaggtaatgccacctgtgtccaccagagtcacgtacttcctcttggcgaaaagaagtgctgctcaaaaaagacgcatttagagaatctgtcaagatcccctctgacactgaagttcttatttgattaataagctaacaagatgcatttccattctcccttgactttaacagaattgaatctgttattccatgcatttttttttctggagacagagtgcaacacagtggcttagagtatggatttcggaggtaccctaacctccctgtgcctcagtttccttatctgtgcaatggagatgataataatctcaggtatagtggtgagaatttaacaagggaattcctatgaaactttcagaacagagcccagcatgcagtaggcatgaaataatgttcgtagggagagggtagccagtattttcttcccctctccccggtggtcaatattaaccagtattttcagcacacacattgcagacttccaccggactgcccatcaccgtgctctcccttagcccactccctgaattctactcgggtgtgtgccagcaacttaacatggccgcttctctttctgtagctgagttggccaagcgctttgacatatgtcacctcagtctgagctcccagcagtcatgagtgatgagtattaggaatttgctctattttaccaaggaaaaaaccttgatccctagaggaaaggtccttcccacagtcaggtgcctgtgaacagccacagcaagactcggatccccggctctcccatgagtcatccagcatggtgggcagccagcagctccgtgccaggtgctgccataggcgctgggcacacgggttcttaagtcaggtcagtcccttcctccttgagctcatacacaggtaaggagggagagagatgttccccaactcatcacgcactcaagttcatttcagatggtggtgaggggtcctgagaagaggaaatggggtgacatgctaggaagtgcctgggtggagggggctcctggagacagggtggtcagggaggcactcacccaggaggtgacacttgacagagccctgaaaagtgaggaggtgcaaccatgcacagggctggggacaggaacacggccacacaggggaatgaacctggccgtttgtggcacagaaggaaggtcagcaagtccaggagaaaggggaggagaagagaacaggcccctggcgcctgcacgtctggaagcatcgccaagtttccaagcatctttccagggcagagaaggctccactctgggcaggaggggcttgcttcaccagcaggaggagttggggagcaggagggagtcctgatgtcctggctacaagtccagggctggaaaaccaggcgggcctccgccgaggctgctccttccccattgggcctccgctatctggttggggcatctcagactgaggagcaggaagtgtgactgtcgcaggccaatgtctgctgacgaatctcccagcccagatggtgggcctgcggtgggcttcctggtgcacgcggaggcgactctggcgagggggattccctcccctttgaatttcctcctggttctgcccacgtgaaactgggctggttggctgggcttccttttctctatttggctttcttattctccaaataaaagacgaaaagtcaaaacataggcataatgcagaattataacgcttggatttgtctaacttcatccctgcaatcgcccaaatattcacatagttcaagaacaccatcgtataacaggctactcagggactgtgacatgatgacacttgtaggaacccagtgtgtcatttagtcctctgtgtgtctgtgtcccattctgtgggtgtgcacacaacaaccacacacaaactcaccggttcccttgtgtgtgtttagacaacatgaaactttgcatcacaaaaccaccgagtgatgtcagaggtgccatgaatcataatgacagctcctggcctggtatccaagagacctcaacatgctgctaagtcactgtcccactccatgagaaccggtcactctctttgagcctccagttgaagggaactaaattaatctaggatgacccatattgtgcagcagctaatgacccagttcacctctggttaattttctgcttctgggtgtcctgggaacgggtggtgtttactccagttgggacaaacctttattaatgagccagagtgttggctgctctgggcggagtgttttaatagaaatcggccaatgggccagggcgtgctgaagttgcagaatatgaatgaggcccttttctttgccctctctctcttccaccctgatttgcataactaagctttctgcctttttatctttttaatgtgtttgtttgttgattattgatctgtcccctatggagggacaaatcattcgcccaccaggcagtgacctaaatttggcagaagccccagccatgtctgcagcaaactggagccagacagttatacttgtatttgtagggacaattccaggagaatttatatggcccaaggttgtaatgatcaaaattacactggcctccagcagactcattaaggggaatcttggcaaaggaagacttgatgagtaagaagaaaagaaaagatcctctttcatggtaaaagatctggcttaatttaacaaaaaagctcaaaagcctctccaaatgaggctgcagtttccctggggaaagagaaggtactgctgagttttagaaatgtggttctcagctgtgtccaaacctatgccaccttttttaaaccaatattttataatttccacacttgtatcttgaaatataattcataaatacagcctatccacatctttttaaaagttcaatataatgccctaactataatataaagacagaagtataagaaaagtaatttatgtaaagtaatttgtaacaaattaatgcatacttcaacatgcaaatgctctgactgaccgcactagaagtgattaagctgtaaatgcagactggtgacaagcctgttgagttgccacctcaaatgtcatgcacattgccgctagtgaggagagggctcaggatgctgacccgctggtggtgaacttctgaacaaaacaaacacgagtttcccttgatttacaccagagttgctgtcccaggaaagtcagtgattattaaaacattatgatcgtctctatgtaaactggacttttcactggaggctcagatcattgtaaatagggtttgcttacatgaatgtccagtgaaacattcaaaactagtgcaagatacaagataaattctgcatggtgtgggattgtcctatgtattacagccgcatagtatcctcagctcacaccccaaatgccaacatcacgctcctctcagcattgtgcacccaaagcacctctttaggggcgagaccgtcattgataaccaccaccccttgcacagccgcgtgtgctcacagaggctaaaatctactgttgtctccacctgaagtttttcttgtcctgtaacctttccctggctggctctccaccctgcccaggatgaggcagggaatccaaggacactcagctacctcaggtctcacccaccctctccccctccccaggcagagaagaatagagtcctgaaaccctgtccccagagagtgaatcaacctcctgggtctgagggctgcacacacatttgttcctggttcccccagggcctgacaacctcactcctattcctctgtcttgggaaatccctcaaagccaactgtaccttctgtgtgggtcttgaggtcctccaccaaggggctctttcctttttatcagtttgttcattcacttgtatattatctttgttaccaaaatatgtcaagataatcacataagtcaagataaaaatggccaatgcaaccacatcttgtcaacttggtgcatttctatgtacatggtcaattttcacacacagggagactctgtctacattttctcccaggattctaccacgcttccttttcaatccttctctaatttccctgccccctgcctgtctcctccttcccaaccccactcccaaatgtgtctccttccacaactttctacacacttctacacaggttcatacacaggcatatacacactgacaaggatttcctgacctctctttataagggcttaggtttcttttgcaaactataatctgactacataaatacttcatactgtgttttcttaatcctcaatatggtatagacatcatctcaattgatatatcaggatccaactcagtatttcaaaataaccatctaatattccataatatgaataaattttacattaatcaaccattcccctgctaatggatattcagagtgttttcagattcaatgattcaactataatcaactaagtatgatcagcactggaataaatatctttgaatatgtattcttgtactgtagagctttggtttctatgggatacgtttctaaatataggatttgttgggtggaagaacatgcatatgttgaagctagaggcactggagtgatggattctgcctagggcaagacaggacttgattcttgctggaggagccatctgagtttgtgaagggcaaggagagtgcatgggccgagaaaggtgctcccaggagtgatccctaaggcagccaacagtaccccactgtgcagataagagaaagaaaccgacgcaaaggaagtcttcctaaccaaattccatagtgtaaaaagcaatgatttggaaattggaaggcctggactctgacttggggtctggaattctctctccaggtgaccttgggtgagtcacttcccctctctggctctagtttcctcctctcttcaaattaagcagctgcactagatgatccttaaggcctcttccctgtgaactttgtatggttcaatgagaacaatgtatatgatggggctttctgaactctaaagtgtttaatgctatgatttgtttggtagatggtaatggattcttcttatgatcatctatgtccatttggttacgtccaacactttcctttttctcacaccccacacccaatcccataagcacctcctaatagctctgcttccaaagtagattctgaatctgctcacttctctcttctctaccctctgccacccccacctgcacccaacctgccatcatctctcatccccaacctcaggacaactgcaacaaccctggctggtcacctggtctaccaacccctcataatccatcctgcactcagcagtcaaagtcagtttgtaaaaggaaaataagactatgttgttcccttgcctaagactcccagtggtttccccaagcttttagagtaaaatccagtctccttactgtggccacaaagccatgcatgatgggctccttgctgcttctgaaacatgctaagttctttctagtctcaaggcttctgcacatacttttttctgcctgggacacttagcccagatggctgcttctcaccctccaggtcgcagctcaagtgtcacctcctctgagaagcttttcacaaccgccctgtccaaaggaggtgtgtatctccatcactctctatccccactctgatttattttcttcaaagcactcactgcaatctgaaatcatcttattcactgtgtgcttgtctcttgctgtctccctactagaacagaagctgcatgaagacaggggtctcatctgccttggacatcactgaatcctatgcacggagcacaatgcctggaacgggaggagctcaatggttactggttgaattaatacactgaggaaatggatcagctgtagacaaccttactttgttctctcatatctctttcccacctgctggccctgcctttccatttaaatccagagccaagcacacattccttactatatatttttttgtactgattaaaatgtttcataaacttttaccacatatggatcagggcttttagttgctaatggaacctactccagccagttcaattaggaagggggtttatttatgaaatcctattgggtagcttgggctcatgcctaccaaagaattagacttgcaggccacacagccaggaaacatggcccccaaattacacaccccccaatcataactggtcccctgatgtctctggtgccttcacccagcacacacatcccagcccatgctgccaatagcacaggtatgagacactgaagatgtatccagaatcctgcaactgccccctgagggactaactgtagctccttccatagaaatcacccatcagtggttggcaaaaaggaagaacaaatgtccactaaactctttaggcaaatgatcacagagagccattgtgtcctcctagccactgcgctcatcacaccagagggctgttctgaaccatccccagttaccccagttaccttctgtttgagtcaaggttctctaaagaaacaggaacactagggtctgtgtgtgtggagggagacagagaagagacggggagggagggagagagagagagagaaagaaagagagagagagagagatttattgtaaggagttagctcacatgattatggaggctgataaatcccaacatctgtcgggtgagttgcaagctggagacataggagagccaatagtcttctagtccaaaagccagcaggctcatgaccaaagaaaagacaatgtctcagttctagtccaaaagcaggaaacagctgagttccagttcacaggcagtcaggctggaggagttccctctcactcagagagagtcatctttttgttctattcaggcctttaactgattgcatgcggcccaccctcctgagacaggcaactggcttcactcagcctaatgatttaaatgttaacctcaccaaaaacaccctcatagcatcactcagaataatggttaagcaaaatatctgggcactttatggtccggtcaagttgacacataaaattaaccactgtctcttctagggctggtgcaactgacagtgataaaaaaaaaaaaaaaaaaaaagccctccaggcctctgagctttgaacctgtttcccttaaagcaatgaggagatgattgaactagtgttggaggagtcacacttggaatctaagtggcagtgcctcaaaaagggttataggctcaacctcagagccttgatgatccagatcccacccgtgatggggaatgggcagagaatggctcccttaatactgcaagtgaggtaggagatcagcaggacttgttttccaagcacagatcatgatcctgctgatcgaagcaggatgcagtaaagcaactggccaaaaccagcagatggtggcaaaagcgatctctagttgccctcactgctcaatagcataaagacactcccacctcctaccagcgccaggacagtttacgaatgccatggaaactatccagaagttaccttatatggttctgggaaccgtctgccccttttccagaaaattctaaataacccaccccttaattagcatataattaaaagtggtataaatacagctagccctggtcttcagggactgctgctctgggctgctctgcctatggagcagtccttctgctgcacactgctgctctaataaacctgctttctttcactcctggctcactcttgagttctttcctccacaacaccaggaaccctcccaggctgagccccagttttggcattaacctgcaccacaagaaacaaaggtgtccctccctccctccctttcttccttccctccttccttctttcttttttcttagggtgttctagaagggcagaaatccatcttccctccctcccttcctccctccctttcttcctttcctacttccttccctcccttcctcctttcctgccttctttcttttcctcctttcctccctcccttcctcctttcctccttccttccttctttctttcttcttaaggtgttacagaagggcaaagtccatcttctgttccttccttccttccttccttctgtctttcttcttaaggtgttacagaagggcaaagtccatcttctgttccttccttccttcctgttttcttttttcttccttccacacacatttagagaccatcttctaaatgtgaaggaatgtcctagaagcagcagtgaaaaaacagacacagtcccgccatcatgggcatcctgagactgtccacctgagagctttctcttaccctgtggccagaaatgctgacagttgatggccctgggacaagccctcggctaacggggcaaagaaattggaggataaacattcagctggtagaggactaagctccagttgcccacagtggcaacaccctgtctcacttccccactcccctgttggtatttcctgggaccacctcccacataaactattatattaggttggtgcaaaagtaatcacggtttttgcataatggcaattatttttgcacctacctaatacttgcactaaaatccttgtcttgggatctgcttctgggaaaccaaagccaggtggaaagcaattgggaacatgggataacttgatagagagtgggcaggggtgagcaaggagctgtcagagagggcagtccaggaggcctccctgaggaggcaacctaggaataggagctgccgggtgaagatgcaggggaagggtgtcccaagctgaggaaatggcaaggccccaaatcagaaacgagcttagcatactggcccatacgcctctaggatgaatctaaatgggacaagcactaatagtattaataagaataggaatagcagctaatgcatgcatagcaccaactgcaggccaggcactgctctagggacttgatgcacatcctcccagcagcctcaggagacaagtgtgatcattgtcctcattttctgggcgaggaaaccaaagcacagggagatgacgcacttggcccaaagtcacccagctagtggtggggccaagatgttaccccctccgctgatgatggcagtggcaggtgggggaggtagggctcataatgtattcacccctgatgcctactgtgccctgcacagagctgcacatggacacactgcagaaccatgagcagtaataacaggggcattcatccagcactaaccctgttccaggctcccttctaagagttttaaatggaccaattcatctaattctcacatcaaccctatgaggtgagggctgattgtcaccatgtgacagaggaagaaactgaggcacctagaggttaagtcatttgcctgaggttgtgggccggtgagtggctgagccagaattcaaatccaggttatttgacgccagagccctattcataaatgctgtaagcatgcacacacttgttggtgcgcacatacacacatgcacatgcatgcacacataagatatgggaatttaaccccagagagagaagaatttttctactggtcacattgtttgtaagacacagtaccaggatttgatcacagtcagctgattgcggaggctccattggaagggaagaaagcagatgatcaaattttgaaattacagagttcaggatttcatgctaccctagtccctacttgcatgtgattataaaccaaagagctgaaattcactcacaattagtaagaacaccctcacgggtctcactgacgatgctctgcacagcctggaggtcagcactcctcccgcagtggtgtttgcctgctgcaggctcctcatctgtgaaacggagtggacagggtcagccctctgcaatggctgtttggagcacgacataacctgtgtaaagtgcttagagccatgcttggcacacagtaagtgctcaataaatgtttgctgatataacaaatgccccatgcataagtagtttactccctaactccccagcacgagacagaccctgtgtgccctccataaataaaagctatggctgaaatcattgtttctaagcctcatttttcccagtgcccaaaggaacagttgcacgtcaaccagaaaatcctcccagcctttgttttgctgtgctgacccatagaatccaaggtcacatgattttttctttcttttgtttgctgtttcttttctgtatggaccaacaacaacaaaaagataacaactgtacctgggttttgtgttttaataattttaataatgcacaggaaattggatggcttagggactctgcgtcaaatgagtgagtcatccttgtcaacagaccaagtggaagcatgagactcaagggcaggaaagagaagggcccaggggatggaaattgaatagtgtgatgggctttaacaatctaaattaaattaaaacttgtcagtgctttcttcatatcacaagtttccagttagagaaagaatgggcccctccaaacagtgagttgaaaaggatgaatttcattctctgcatccccaagaccaacgagatgggccctgcctgtctcttccacgacaactccactcttctctcattctcggccacactggcgctgctgttccccaagcatacccgcatggctgtccccacctcccagacttgaacttgctgttcctctgctgggacctttgcatgtctgcctcatcccccacattcagggcttagcccttacagcagtcagaggggctctctgcccccactctgtatctaaggggcccaccctgttgtccccaccctccactagtccatggccctgttacattttcctcatagccctcatcactactctattttggatgcattctcaatgtgcactccaggagggcaaggatctcatctttcctgcttgcctctctctcccaaacacctagaacataccaggcacatagcataggtactgcatacatccttgtttggtgaatgaacaaatggatgaatgaacatcttggtcactatctctccagagccaaataaacctttgtaactgagtcatttgcctagaactgctgagtgctcttccttgaggcccatatgaacccccatcttgctggttacttgacctgattggcaacagcaacaccccacagcaatgggcactgtccattctccaccccacatcctggcagccctgggcctgccagtgtgaaggcacaggaggcagccatgggaacgcgccacggaagtgaaaaacttttcccagcaccatttctgtggcctagaaaggccctaatgatattttctacttttctttgctgaataaattgggcagcaaatttcatgcacatgtgctcagtgatcacctattgatgccttgaacacagatgtttgattctggcttttttggagccgttgctagactgagagttccatgagggcgagggtcgtgttgcatgcatcttcatgtctccctttcatgaggcaggagctcagatgacatctcaggtgtgacgtcatgtgatgtcatgtgtgttctgtgagagggacatgaaaagccaacagagtcatctagaaagtttggtcactctggggatttcccaatcagagcaatcactttttcttaagcagcagatctctggtcttacttttttgttgttatacaatattcatttctttttttttttttttttaagagacacagtcttgctttcaaccaggctggatggagtacagtggtatgatcgtggctcactgcagcctcaacctcatgggctcaagatctcctcccacctcagtctcctgagtagctggtactacaggcacaggctaacacacctggctaatttttaaactttttgtagagataaagtttcactatgctacccagcctggtcttgaactcctagcctcaagtgatcctcccacctcagcctcccaaagtgctgggattacagacatgagctgctaggcccagcttgttaggaaatagttcaagcctacagaaaaatataaagaagaatgtaatgaatatctgtgatcccatcgaaccagctcagtgaaagcttatcatgctatatttgcttcagatttttttttcaaaataaaacacatggaatgattaatgtccctggtgccccttctaccgtcccttctcccaccgcccacaggtccacacttggtgctccttgttcctctccagggctttatgctttgccacacatatgtgcctgtaaacattacactgtccagttgatgtgtttaaaccatacatgaatggcttgtcactttcaacagcttgctttcttatttaaacttaactcccataacacactcactggatgtatatggaataaccaaataaaagcagacaagctgtatcatgacaggacgtgacaagtaggagggagggtaatgaagtggggtacaaggatgcaggggagacgggggagtgctcagggaagtgctatttgagaaggagacatttgagcagagatctggatgcagtgagggtgtaaatctggcaaaaggcgaccaacccgtcccagctttctggtgactttcccaacactgaaagtctcaggtcccaaaaagctcctcagtctcaggtgaaccggagtacccagggaaagaatgtcaagagtaagaaacatggagtggaagggacttgtggtggagcgagtttggcctgttagaagaagggcccccgaggctgagtggggcaaggagggtgggcagggaagcagaggcagatttagtccactagggagtgtgggcaggtacatgcacagtgtatgggagctgacgtgtgggttagatgccactgtgaattcaaattttactccctgagatgattattttcctaatttaaagaaattatcatataggaaagttgacatttttggtacagatttctgtggatttttttttttttttttgagcctttgtctttttctgtcacccaggctggaatgcagtggcacaatcttggctcactgcaacctccgcctcctgagctcaagcgatcttcccgcctcagcctcctgagtagctggaattacaggtgcccgccaccatgcctggctaatttttgtatttttagtagaggcggggtttcaccacgttggccaggctgatctcaaactcccgacttcaagtgacctacccgcctcagcctcccaaactgccgggattacagatgggagccactgcacccagctgatttctaaggatttttgacccatgtagaaattcatataaccaccaccaccatcaggatccaaaagagtttcaaccccccaacaattgtccggtgccatccctatagtgaacccctggaaactgctgatctgtctccatcactataacttggtttttctgaggatgccaaataaataggatcataaagtacataattttgggacactggctctgcccctcagcataatgcctttgagacacaggcccatggctgcaatgtggtaatggttccttcctttccacagctgagcgtcattctggagtatgggcatcccagtttatttatccattcactcgttgttggagaacattagggctgtttcaagcttctagatttttgtgtcttctggttatttttgagaatttcacagcaattacactctatatctggtaatgagtttcagaaaagtgctttagatggaagttctgctctgtattaggaatatgtccttcactgattagcatataaggattttagggaggagattctctccccttccccatctcctgatggcagaccccgaatttctcaggatgttcacttaaaacagcatatttctaagccttgtttctagctctactacgtgagtgaggtaatagtttctgccctttccttttaaatgagccataactattttttaaaataatacatttctcatatatgtcttcttttgaaaagtgtctgttcatgtcttttgcccactttttaatgttttttttaattgtaacaaagatatggaatcaatctaaatgcccatcagtgattgactggataaagaaaacgtggtacatacacactgcaaatactatgcagtcataaaaaaataaataaataataagatcatgtcctttgcagggacatggatggagctggaggccattatccttagcaaagtaacacaggaacagaaaaccaaataccacatgttctcacttataagtgggagcctaaagatgaaagcacatggacacgtagtgaggaacaatacacactggtgcctttcagagggtggagggtgggaggaaggagaggatcaggaaaaataactaatgggtactaggcagaatacctgggtgatgaaataatctggacaacaaacccccatgacacaagtttacctatgtaacgaacctgcacttgtagctctgaacttaacaaacaaacaaacaaacaaaaatacgttttattatgtaagtaaccttaaaatgagaaaaaaaatccaaagatcaaagactggttccttccattccaagtagcctgacaagaatatctaggaaccaggaaaccctagcttcccccgcagtccagatggaaggaattgggcttacaaaagaccccacagggtctcactgctaagactgtggtctgttctgtttatgagcttattctgtcaaggcctgttgggtttggttttgtttaaggtttaacaggatttcagacttagtggtggtctctttggattttctccttctttttccttttgatgcttaaacatacccccacgacaccaaagaaacaaccatggctgaaaagactagaattacacaggatgtaattccctttcacataaacgctgaagagtgtcacccctggagctgtgactttgctgcaaggagccgaaaaatgaggatttgtttaaataaagacacagagtaggctacatgtaagtagagtgtggacttaaggacccctccttggggttgaggcttcaaatcctaagctcccaaaggggaccatttgaaaaacaagaataatttctgtttggccaagtactgcactacatagctgcatttgagagaagaggactgagtctttttaggtttgcgaattccagtttttccttttttttttttttttttttttttttagacaaggtcttgttctgtcttgcaggcagtggtggctcactgcagccttgacttcctgggctcaagtgatcctccagcctcagctttccatgtagctgggactacaggcatgcgccactatacctggttaattttttttatggtttttttttttagtaaagatggaatcttgctatattgttcaggctggtcttgaactcctgggctcaagtgatccttccacctcagcctcccaaattgttgggattacaggcctgagccaccacgcccagcccttcagtgtagtgatctatggtggacatcatacccttctgggggcattttggatattgtggggatggttttggttgtgttttgattggggacactgacatttattcaattattcaataggagtccagggacactagaattctgccacattcaggacactcagacacaacaaagtcccatgacttatccatatcccttagaataattcatgagcctagaaactcactccattttacacagaactctaggtattgatggcagctttcaaaggacattgaacatagagtttgtagtctctgcccacagacaccactgttcctttttccctaactgcctgtgcagagtgctgctgagccgtgtggcttcctgctctttgattggcctactcatcactggaggtgcagacgtctcgctgcttctggggtttgtctagtgtagctacacgtaatcattttcacatatttattataagttcattttatagaagttattattttgtattatctgtattattttataacaagcttgttcccttttccctcttttatattacaattaagacatcatcctgatttgcttttaggttatacatataggtaattcctattatttttgaatttcattttagaatagtaaagcatcatcataagatatcataaaatacagttcagtctaatagggctgaggatcgctgttcccgtggaactctgctatggacgtttgctaagaggcccagaatcggatttttccagcaagaacatcctgattttactgtggggaatatttatctactggacccagtcttgacgaccttgatgggcggtcttagtttggcaaaggttgtttgcactgacatttgaaatccaccagagacccagtgccaatcagcatgagaagtcatcttctcaaagcatcagtaatttatgcaaaacagcacattccccttctattccattttagttcatttctctgttctccttccagctctttccattcctccagaaaggtcttttctgtttaattcctgggtagagatggctccttgtaccccagtgtccttcccttccttcagacagtgatttttagttgggtgcttggtcacctaggctaaagattgctgttcccagtccccctgcaggagatgtgccacctgaccacgatctgtccaaagggatgtgagaagtgagggatgcaggttatgtgtacccttagagatgagtcctgctagccggactctgtgtacccttagatataagagtcctgctggcaggactctgagtacagaaaggaagcatcttggagcttgctgccaaaggtcctagcctagtgatggcaaaacaggaagacaggaggagctggggtccctgacaatggagccgccacagcagccctgggccattgcttttgactattgtgtgctagagaaataaacttctatcttaacatactgttattttgtgtgtggcaaagcgtgtgctcatcacaaacccatttcttcttcctggattcacatggagaccacatttccagcgtcctctgtatcaggtgcaggtatggagtgtaagctttcatggtggatgcttcagggcatccagaacaaagatgaacgccccacagagctatcttgagagccacaagctgaaggtggcagtgccacaggagagaaggatcctgggtccccaaaccacaggggggcactccctacacacaaccaggagcattcgcttggacaattagaggaacaagaaacaaacctttatttggtaaagccactcacattttggagtttgataccttgtatgaccttaattaattcaagtttatgtcccagctctctacatcctaatcaaagagccctgagcacacaaaagaaaaagatctaggtctttctggaatttctgcataaaatattcataaattaattggtagaaagaaacctgtcagtcatccacttgcacagcaaatacccattgagcttcaacttgagcacagtggtgacagaatggaaaaggaacctgtagggtccctgctctcctggagcatatgatggggacagtcagcggacaggtcagtactgcagggatttttatggaaggaggtgtgttaatcgaattttcgtgaaacaaatcacattctgacttcctgccaatgatataattttattttctgctttagaaatctttcttggtgtaaaatgatgaatgctttcataatataagcaacaaatccccactttttcttgtttcatcttctgtaagttctggattctttgtctggttttctaaaggcagtgcactctggttcagcaaaggttgtttacattgacattttaaatccaccagagacctattgccaatcagcatgaaaaaccatcttctcaatgcatcagtaatttatgcaaaacagcccattccccttccactttgtttcagtttattctgaggctctggccaggcctctgtcaagcctggtggcatctttcaggcgtgcacaaatgacctacagatacaggggtctccattctcatggtgagactgggtgaactcccagatgttcccaatgcatcccttctggtaggtttctccaggaaggtacatcctgcagagccatcctttggcctgcaccatctcattctgaatttctggctcagaagtcaacaaactacagcctgtgggccaaacctgattacacttgattttgtaaataaagttttattgcaacacggacacactcattcatttacatattgactgtggctgcttttgcaataaaatggggagaattgagggcagaatggcctccacaacctaaaatatatatatatattttgtccaagatggagtctcactctgtcgcccagactggagtgcagtggcatgatctcagctcactgcagcctccatctaccaggttcaagtgattctcctgcctcagcctcctgattagctggtactacaggcatgcaccaccatgcccaactaattttgtattttttttagtggagacggggtttcactgtgttggtcgggttggtctcaaactcctgacctcaagccatcgcctgcctcggcctcccaaagtgctgggattacaggcaagaaccaccacacccagccaaaatactttctattttataccctctggttctttttagaaaacgtttgccaactactgacctagataattaacttccttggttttgcctaattgccctggtttgggtaattctgtaagtgtgacctctggctcctccttaccctgcatcttgaagctgaacttgagtggatggagtttctagttctttaatgggaatttggctcagagtcaatagaaagaaaagaaaaacacactttttaaggttttatattttattaaattaaatcggattgaaaacaaaaagcaacagtcctcaggtcctatgttttcaccttcagtccatgcctagggttgaccacttttgatagtttcaaattttttggtgcttctggaactctaaatattaaccttcaagttctagctctagacttgtcaacttcagagagtggctattgactaggaaggctgacatcctgccaatgatataatttttattttctgctttagaagtagtggagcttattagttcacttctctgaagctaaacagtctggatttgaaattccaatactaatacgttctggtaaataagttattttacttcttttgaccctctatttttacgtctgtaatatggaataataatagaaatggtctcatagtgtccttgagaagactgcatgtgttaattcacgtaaaaccaaagtgaagagcttcttgtatataagaaacagtccgtacatgatgattcctttgttttttctttcacattttaagtaacacttgaatatcttttttttttttgagacagggtcttgctgtgttgtccaggttggaatgtaatggcatgatcatggctcactgcagccttgacatcctaggcttgagcgatcctcccagctcagcctcccaattagctgggactatggacctgtgccagcatgcccaggtaattttttaaattatctgtagagaaaggtctccttatgttgcccaggctggtcccaaactcctgggctcaacgaatcctcctgccttggccccctagactgctaagacaataggcatgagccactgcgaccagccaaacttgaaagtctttctttcttcatccatctatggacataacccttggctccccagttaccagatgataatactataaatgtacacagtgcctactttatgtcaattgctgtcctgagaatttgacataaacattaatttactataattggcaactgcatcctccagttgctcaggccccaaaccagagagtcatcttggacttctccctttcactcagcatatgcactccatcaggaatcctgctggcttcatcttcggaatgcatctcaaatccagtcacttcctaccccgtccacagtgccacccaagtcctggtcatctctcacctgaattatcacaacagccaaagtacatgctagcatccttgtaatgatccacaaggcacttacccctgagccctggagcccctctgtgcattgccttccattcccataccattccacctaccatctcccctcccactgccccctagcacactcccttatcactccccagtcactctgtcactccaaggcagccacagagggctcctgctattcctgcacaatccaggcacacccgccctcatgggctctgtgcctgctgtccctccacctggaatgctgttcccgcctataagaaagtagctcactctggtcgggtgtggtggctcatgcttgtaatcccagcactttgggaggccgaggtgggtggatcgggaggtcaggagttcgagaccagcctggccaacatggtgaaatcccatctctactaaaaatacaaaatttagccgggtgtgatggtgcatgcctgtaatcccagctactcaggaggctgaggcaagggaatcacttgaacccaggaggcagaggttgcagtgagccaagatcgtgccatcgcactccagcctgggcaacaagagcaagactccatctcaaaaaaaaaaaaagaaagaaagaaagaaagaaagaaggaaagaaagaaagaaagaaagaaagaaagaaagaaagaaagaaagaaagaaagaaagaaagaaggaaagaaagagaaaagaaaagaaaaaagtagctcactccttctccccttcaggactctgctcaaatgtcacctaatcagatagactctctaactgatgtatctaatagcagaccacaccatcactctccaaactgttgccctctttaatttttcttaaagccctatcccttttggacactatattagaaatcttagttaaatctttgttccctgcccccctgcagcctgggtctggtttgctcattgtgaagcccccattgttccgccagagctggtgcacatagaaacgcagtgagcatgggtgagtaaatgagtgaagggatccagccgtttgctccctgcatcctgtcatcatgcaacacagtcacaaatggaactccagacagcaagacttctccgcgtgctgcctaactcattccatgagccaccagtggcaggaggatcacaattttggaagcatcaatccagcctcaggtggtttctacctcggggccccggtctgctcaccttagtggacctgcctgatgctggtggagtcttatttccatctggggcccctgcacacacttcgcatctggctgtccctgcacacagggcccttcactgcctaaagctgtgcccacccaggaccacaaccagcttccggggctcctgcccctgctggtctgccccctccctcttgctccctcagttcagggctctggtcctgacagctgtcctcttagctggagatgagaacacaactggcatccacattccacctggatttgcataatcaggcacatttactgccctccctcactctgtgccataattactgacttgctctgcattcaacacttttcaactccatacacgtcccttctccctcctgcatttttaaggtggttattacagatatggcagacacggctttcccagacatgaatctggctttaaaaatgcaaaaagatctttatgcccatttatgtaattatttctgcctctaaaactgggggcaccagcatgtttagtcacttgaggggaggggaagacctgtagtgtattctctacaagcatttgcctttttaaaaaatgcacaagacccttgtttcctgcattttcccaagaggggaaatacctcttggtccctgagagtcagacagggtgccttggccaggatcccatgacagctcagtccgacagaagagcttgcaaggaaggatgatgctaccgtctatggaaaagatgagtgtgcaaattctctagatcgggcttctcactttttactgtaaccctcggttagagatatgtgttttatcagacatggtgtaaacacacttgtgcacttagagagacagagagagagaaaaagcgagagttagcacagaaaacaacagttatccttaccacatacaggcacagggcattttctcttctattgcattctatcctatcaattctgatatatttcattcaatttcatctttttttaatgctggctagatcaactgaattgatttcatgactcattaaggggtggcaggtgtggtttggaaactgtgctgtatgatggcattgtcctttcatcatggaaagccaagcccctccagatatctcacttgacgagatccctagaggcaagctgaactcttttcctctggaagccttgcatcacagcatcaagaaataatagattttgttcaatgaaagattcctatgactctggagatgcagtgagcaaaacccacaatgcaagagatgacctggttgtttcaaaaaataataattattattattttatttatttatttatttttgagacagggtcttgttctgtcgcccaggctggagtgcaatggctcggtatcggctcactgcaacctctgcctcccaggttcaagcgattctcctgcctcagcctcctgagtagctgggattacaggcacgcgccaccatgcccggccaatttttgtatttttaatagagatgaggtttcaccatgttggccaggctgctctcgaactcctgacctcaagtgatctgcccgcctcagcctcccaaagtgctgggattacagatgtgagccaccgcgcctggcccaataattatttttaaaaacggaggatgtgatagattcgtgctgtccgattcggcagccacaagccacaagccacaggcgtccactgagcccttgaactacggctggtccaaactgagatgttctctaagtataaaatacacccctggttctgaagactttgcatgcagaaagattgtaaagtatctcgttcaataattttactgttacatgttaaaatggtactttggatatactgggttaaataaattatcaaaattaattttacgtatttctttttacttttttttttaagttggctcttggaaaattttaaatgatgcatgtgactcacatggtaatattgtggaactgaccaacaatccaaagaaaccaactgaaaaaaattgagaccactggggaaatttgaaaatggggtgtttgaggatatgaaagaaacattattaattattttttaagtgtgataattttgttacaaaaaatgttattttttagaaatatttacagatggacagatgtatttgagatttacttccaagtaacagaatgagggggcaaaaaaaaaaaacaagtaggggatggctgtagctgaaaccagtttggccacaggggctgaggctgggtgatgggtatacaaggctcactccatcattccttttacttttgcatgtttgaaattttctaaaatctgaaataaaattttgaaaagactggagaaatttactacattaaaaaatcatagacaaaaccaaatcaaaccccaaacagacagcatatgtgatcagtgtggcaggttgtgtggctgtaatggtggattctagagtgggacagtctgggtacggatccagacattgcccctcacctgtaagctgtgtgaccctgggagagttatgtaacctctctgtgctgcagttccctccttcgtgagtggggataagaatactgtatctatacagtggggtcagggtactccttccctatgactgctttgacaggctgccattaactctgtggcttaaaactatgcatatttatgatcttacaattctggaagtcagaagtcaaaataggtctacagcagcagtccccaacctttttggaaccagggactggttttgtggaagacaattttttcacagaccagggatgggcacgttttcgggatgatccaagcgcattacatttatggttcactttatttctattatgattacactgtaacatataatgaaataactatacaactcaccctcatgtagaaatcagtgggagcctgagcttgttttcctgcagctagacgggtcccatctgggggtgatgggagatgtgtccgatcatcaggcattagattctcataaggaggacaccacctagatcccccacatgtgcagttcacaatagggtctgcgctcctatgagaatctaatgctgctgctaatctgacagggtggagctcaggcagtaatgtgagcaatggtgagtggctgtaaatacagatgaagcttcactcgcttgcccgccgctcacctcctgctgtgcagcctggttactaaaaggccaccgaccggtaccagtccatgaaacaggggttggggacccttggcctagagaattgtgttccttctagaggtcctctctgttttcttatactttccagcttctagagacagactgcatttattggctcatggtccctccttccatcctcaaagccagcagcatagaatcttctctttactttgacctcctactgtccattcatataaaatccctcaaggttaccttgggtccatccagataagtgaggagaatctccctgcctaaagatccttaatttaatcacacatgcaaagtttctttgccatgtgaaataacacattccacttttgggaatgaggatatagacatctttgatgggacattatttaacccaccatcatggaattgttatgaagattaaatatgttgagcacttacaagcattcctggcacctatgtaatcattaattaggcattaataattaatattatgattatcattattgttatgtagtgttcatattgaacccatcagaaaaaatgttgcagccaggtgtggtttgtaactgaaggaaacttagaaaaagtttaagtaacttagaaaaaggctgttgtatgtcctttgtcccccttcaatttcatttcttcctctttcctgctggctgggcagtgggtgtaatggctggagctggggctaacattttgtaccatgaggcggcccagggaatggaggccactcatggcagatgaacaaaaataaataaatgtggcaccatgagggcttggtagagcacaaccccacacccaaccttggattgtctacctcagcctgtcacacaggagacaaaaataaatttatactgtgctcaacctcttgttatcttgggcctgggtcactcacagcagaatgtaatcctatgaatactttaattttaatctgtttctcatcaatcataagagatgtcaaatgcaccaagaggccacagaatgaaatatgaaaacagtctgtgtctgcagagccaaagggctttgctgtttgcttttcaatatatgggactaagaagggaggtaatgtaatcatcccagcttgtctgaactgaggtttcatttatttcttccttttcttatcatatttttaaatgacatggttcttgatgcagcaaaaacaacatgaaaagaagatcaaactcaggctataaagtcatgtgtggaaggaaatgacgagctcaggtggaaaggactctgtgacctctttgagcccacatccctcacctttcctccttggcctctgttcttctagttctgtgcacataacagctcctctgggctgcctcccctggtcccctgagggaccaatgattctacgtgcattattcagtgtctttcattacgttgtcaacatctacagacatgttgtggacactttgtgttttctttcccaatatccattcttccctcttctgacaataatatttggggctccttctctccctgttccccaattcatgtgatcaagaggtgcctttttcctaacctttagagataaaagcctgtcctgggcaaacacagtaattcatgcctacgattccagcacttaaggaggctgaagtggaagaatcgcttgaagccaggaattccaggctgcagtgaaccacaatcatgccactgcactccagcctgggtgacagagaaagactccatctctaaaaaattttaaaaatttttttaaaagcctgtccctgtatcatattctctgggccacagtgattgagtcagtggctgtcacattacccaagctggtcccatcagggcaagtcttaagacttttatggaagatttcaggagagactttgaggggtgggagaggaggatcaggctgatcctgaggcagcttgattaagcctgaggggaaaaccggaagtttccagaatttctgagaacaaggaagaaaccttgggctaaaggtattagttgagtccctagattgagccatgcctaactcagatttacttcccaaccctatattttagtatgtcatgaaatgcctcatttgttgaaacaactccaacctagggtttctgtcacttgcagtagaaacagtcatacggatggcctgaatgcagatctcccagaagcagccctaagaaagaatttgagtgcagtgggttgatttgggaggcaatgtcaggaagcaccaggaggggaattgaagcaagagaaggaaggaagtcagtacagagtgaggacccgaggagaaggaaggaagtcagtacagagtgagtatctgaggagaaggaaggaagtcagtacggagtgaggacccgaggagaaggaaggaagtcagtacagagcgagtatctgaggagaaggaaggaagtcagtacagagcgagtatctgaggagaaggaaggaagtcagtacagagtgaggacctgaggagaaggaagggagtcagtacagagcgagtatctgaggagaaggaaggaagtcagtacggagtgaagacccgaggagaaggaaggaagtcagtacagagcaagtatctgaggagaaggaagtcactatacagtgaggacccgaggagaaggaaggaagtcagtacagagtgagtatctgaggagaaggaaggaagtcagtacggagtgaagacccgaggagaaggaaggaagtcagtacagagcaagtatctgaggagaaggaagtcactatacagtgaggacccgaggagaaggaaggaagtcagtacagagtgagtatctgaggagaaggaagtcagtagagagtgagtatctgaggagaaggaaggaagtcagtacagagtgaagacccgagaagaaggaaggaagtcagtacagagtgagtatctgaagagaaggaaagaagtcagtagagagtatctgaggagaaggaaagaagtcagtacagagcaagtatctgaggagaagaaaggaagtcagtacagaccgaggacccaaggaggttctgatctgggccactagggcttcctcccactgggggcctcttgaagagctgggctgtttgtgcactgactcctgtctgtcgctggttgtggaaggttcctagagtcataactgcctgacccttccccctacatgggctgagcatgccccagcagccagagaaagcccctggcccacagttggaggggctggttataggaagccgttgcatagatgtaaaccaggagcctaaggaccaggcacaaaagcctctgtcacactgtccctgcagctggggtgagtctgcgagtagctaaaactgttacaggaaaggagtaccaatccagaccccaagagagggttcttggatctcacacaagaaagaattcagggcaagtccacagagtaaagtgaaagcaagtttattagaaaagtaaaggaataaaagaatggctagtccgcagacagagcagccctgagggtgggcccatttttatggttatttcttggtgatatgccaaacaaggggcggattattcatgcctcctatttttagaccatatagggtaacttcctgacgttgccatggcatttgtaaactgtcatggtgctggggggagtgtagcagtgaggacaaccagaggtcactctcgtggccattttggttttggtgggctttggctggcttctctactgcagcctgttttatcagcgaggtctttatgacctgtatctcgtgccaaccttctcatcctgtgacttagaatgcctgtctgggaatgccctttatgacctgtatctcgtgccaaccttctcatcctgtgacttagagtgcctgtctgggaatgcagcccagtagatctcagcctcattttacccagctcctatttaagatggagctgctccggtttacatgcttcctacaaaaccaggcttggctttattttcacctccacattcccagcgtgtctgctgactaaatggatgaatccatctttggagttttttttacccttggagggtaggaggaatttttcagccggtgggttcagcaggagctacagtgactgaatggcccctaaaaagtagcaaatgtctgagttgccatttgttgaaggttcatggaaatgccaagtccaagtggcaattagcatgagtctgtgggatttcccgcctgaaaagcaaatgaaggatttcttctattcttctgaattgtaaaccaagaataaaattctaagccccccaagcaactgaatggacccctcctgtcagccaagggtaccctaaatcaacctgaaacactagttcaagccacgatgggaatggatggtcagacaggcctcattacacctcgtccttttgcagttgaggcacagctgaccagcattaacattaaaacagagtcctaaagactgacaatagactttttatagcaataagataccaacatgacagcgggctctgaaagaaattgaagtattttaccctaaaatatatttctttgacatattgtgaaatagccctgataagaaacatgtattaggttggtgcaaaagtaattgcggtttttgccatttaaagtaatggtattaaaagtaattgtaatgccattaaaagtaatacaatctcttctctctaaagccagctacttggaggcttcatctgtgtaataagaacctcagtcaccacagccccttatcttaacccagacactcctttctattgattccgagactttaggtaaccacttaactctttcaaccaattgccaatcagaaaatctttgaatccacctatgtcctggaagcaccccactttgagttgtcccacctttttgaaccaaaccagtgtacatcttacatgtatcgattgatgtcttatgtctctctaacatgtataaaaccaagctatagtctgacccccttgggcacgtgttctcaggctctcctggggctttgtcatgggtcatggtcactcaaatctgaatgtgaccatggatcgtggtcactcacatcagaataaatctctccaaatacttgacaggggttgattgttttcatcaacgataatagaagatagtttcatttaaggaaagctttgaaagtcaacaaaactccaggcatttcttttaagggcgcccccgcccaccaccctttgtttttcccttcacagataaaaacagggagttccctcccaagcaacaaggctcttgaagtggagtggggatgaaggggcacttcgtctcaacagggcctcccttggagaatttaatgtctgctggatgctcccttgaaaagaaataaacctcatatgccaaatatttagccctccaaaactgataaaggaggaaagggaattaccatttcagcaggggataacttactttcagatttttttttttttaaagacagagtttcattcttgttgcctaggctggagtgcagtggtgcaatctcagcttactgcaatctctgcctcctgggttcaagagattctcctgcctcagcctccagagtagctaggattacaggcacccaccaacacacccagctaatttttgtatttttactagagatggggtttccacatgttggccaggctggtcttgaactcctgacctcaagtgatctgctcgccttggcctcccaaagtgctgggattataggcatgagccactacactctgcccagcccagacttttgaatgtcatttggtctaaccgccaattcactcattcaacaagtatttattgagcacctgctatgcatcaagtatagaatctaagcaccacagaacttacatcctagtggagaaaataacgatagtcaacacttacaaggtacttaccatacgtcatgcgctgttctaagttctagtttgtgtggttttcatcctttgcacatctttgaggaactttgtcttggaggaggaaagatccattcaacactacattaaatccatttggcatcctgaccaattcagcccagcacacacaggaaatgcgcttatgtgctgcccaagacatctctgtgactgcacaggtgtggggtgtcattgatggtgcagccagcatccaacccccaaccccatcctccttcccaagagtcctggacttgtttacgagcctcctgctcccctctgcatctcatgggcctcggagatgctgactgcgctccagctatggagctgctcaaatttaatcccatcttcctggactgtgattgagtcaagggtgaacaggatacccacctgagccaagggtgttctaggaggtgtctgctggatccttgcaagcaatgccttccttgcacttttgggagacattccagaaatgaccccgttactcctgctggacgggaacagaggtcaaacaggaagcaggcagactgtgggcagcagaccagaaagatggaaaacctctgggccctcaaggacatcttcaggtagctgaatgaaccaagcttgcagcccaccctgccttaatggtcgagatacacaagccagcacactacgttacagatggagcctctgtgcaatgtgggctctgtgagtgcaggcaaagctatcttgattcataattcatcccatttacggtgttgacagagggctttgagctgatgttttacagtttgttgtggttatcattgttcattttcttactctttgctttttaccctcagaccatggttgaaattttattttaccaagaatattcagaccactgttatagccatgaatgtcatataaggggaacactagattttaaaatagaggtgattttttaatgatcacaagtgggttggagtttgaaacataacatgattattaattgatgaattttaaaactcacaagtgcttcctcaggtgataaaccaagatgatttgtacctaagaccagactttctctggctctatgggcaactaagttacttaaaagtgtctctttttttctgggacctttttgttttggaatttttaaaaggcttaatttttttttagagcggtgtttaggtttacacaaaaatggaacagaaggagcacacccccacctctcccccagggtgacacagtgaccaggcttcttcccacctgtggccctcccatctacagcacaggcctctcacagtggcccaggggacagtctccagtccactcagtcatcttcagcatgcacctctgtggggtaagcttgattcaccaatatctctaaaaggatattttcttttcctccattttttttccagagacggggtcctgctgtgtcttccagagtggagtgcagtggcatgatcatagctcactgcagcctcgaattcctggactccagagatccttccaactcagcctccagagtaggtaagactacaggcacgagctaccaaaccaggctttttttttttttttttttttttttggtagaaacggggtggtcttatattgctcaggctggtttcgaactcccgggctcaggtgattggcctgcctcggcctcccaaagtgctgagattccaggtgagtgccaccacgcccagcccacattttacatttgatcattgtttgtgtatgtacaacatgaatgaatgacggttgcatggagagacagagagactgaggaaaatacagctcagccgtccaaatacattacctcccacattttttaaaatctgttaaacttcctctgaccccctcccaagtaccgtgatgtgatggagacaatgtcatcagtggcttactcctgagacccagaccaacagggaactcctcggagagattttgatgctccacattttaactacattcctatttcctaccaatttctcaatataattcccaatgtaatttatgtagattttttttttaaagaaaatatggccttggtgggaatgctggtcttgcagctgcttcctcccatgtattccacccatgcacacagccctagactcactccagctaggaaggaggctgcgttcaatataaatgcaaaacgctccagacattcatgattatctgtgctgtgcatgaataacgacagcagcttgcaagtgggcaggacttggcggcgaggccccatcacaaatccactgccacaccaacacgctccaacgaagtgcctgtgaaatctgccttcagtcactaatttcacactccagggacagagctgagaacagctccgagctcataattctcattttaataacagtttccttaaccttcagacactctttacagcactttttgacaccttttcaaaaattaaaatcctcgattcctttcaggttaaatctcaggtttgctttcgtttaatcatccctttaattttgtgacttcacaaatagcagagattttattttgtcttcagataccttgcaacactttctctagcttggttgcatttttaaaaatcaaaatgaatcgttcacatattctacattcattattctgtctcctgcagcgttctaaataatgtaggtattgtagatgcttctgtgatgagcacggaacgcatttgcaatgccctgctaaaatatgcttttcatctcctttcagatcataaaatgagttttcttctcttggtttctgaaggcctgagaaatactcttctcttctggaatgtattgcaagacacaggggagggtcctttgggacagaggataagatgagtctgattaactggaccaatgaaattgacagacgagcaggcatggctccaaagtgggaaacttacaagaattttggtgactggatttatgaaccccaaagaggtttgtacctggaattatggtttgattgtttctgtggtcagctgacttggttgtactttcccatcagtgactcagcccaggtgagacaactattcagatgcaagaatattatgatagtatggctcagtggctatatacaaattgcactggtttgttacttaaattggcttgttagaattcttttttttttttcgagacaaggtcttactctgttgcccaggccacagtacagtggcacaatcacacctcactgcagcctccacctcctgggctcaggcagtcctcccacctcagcctcctgagtagctgggatgacaggtgcataccaccatacccagctaatttttgtgttttttgtagagatgaggtcttgctatgttggcctatgctggtctcaaacccctgagctcaagcgaacctcccatcttggctttccaaagtgctgggattacaggcatgagccaccacacctggccagaattcttttaataagctatggttcacatggttgtacattttaaaatgagatttgacatcaagaaaataataaattaatcctaattttgagttcctagtgcaagtctctccagttctcagagactctaggggaaaatgcattccttgcttcctctagctgcaggtggccgttggcattccttggcttgtggccacatcccttcaatctctacctttgtggtcacattgcctcctcctcttgtgaccagctgtctgatctccctctgtctttctcttgtaaggacatgtgtgctagcacttacagcctgcctggatagttcagaatcaactccccaagattcttaacttaatcacactatttgccacataaggtaatggtcactcttttgccatacaaggtgatattttaggctccaagcattaggatgtggacatgtctttttaggggctactgctgaagtcactgcaaggtcctaactcttttcctcttttgagatggtgaaaaaggatttcctttgtagagggggacaatctggggtgttatgttagtttcctatttgctgtcataataaattactgcagggacaggcacagtggttcacgcctataatcccaggacattgggaggttgaggtggatgaatcacctgaggtcaggagtttgagaccagcctggccaacatggcgaaaccccgtctctactaaaaatacaaaagtagccagccatggtggcacgtacctgtaatcccagcaactcgggaggctgaggcaggagaattgcttgaacctgggtggcggaggttgcagtgaacagagatcctgccactgcactccagcctgggcgacagagggagaccctatctcaaaaaaaaattaattaattaattaattaatttaaaaattaccacaaattcagcagccctgttttttcttggcatattcctctcatcacgttctagctttctgtctatccaagcagtaatgatcccaacaattcttctttcctatcctattggattctcctcccattccacatttccacacctctgctaaagcacattccttgccactctgctgactattgcaaaccccaacccaaccctgactctgtctcctctgccaagcccccatgaggtttgctcttctgctgtggagttcactaaaacaacagcattttccagcatgttccttcccttgatcaaaagccttccatgcctctcctcaccccagcaatctggcccaaagcagaccctgagaatacacaagatgatttccaggataacccagatgaacatctttttaaaggcccatgtttattttatcagtttcagggtaaagagtagtcggaaaatgaaactcatgtcttcacaaatatttatgcttaggatgcagctgtaggtgaagtaaagaaaatggaatccattcaaataaatataataagtaaattaatatccaaatggaaggcaggtagggacaaatgatggtggtagtaaacggattattaaagtctgaaaagtcctgacccacaggataaattctaaattagtttggaaaaaaaagaatattgactctctgagccagtcttgctcccagcatgactactatctaaaacatccatatttttgccagacgttttctcagcatcccctgaactaaccacctcatgctcatgggtttctcccacctgccatgtcccccacccctcatcttgctcgtgtgaatcctttgagacccagctcatgctttaccccctccaagaagccttccctgcatgccagctcctctgagatcttttcctctcctggctgcctatggtgcctatcgcttgaatgtctcctttgtgctttctccacaacccatctggtgctttctccctgagtgatgtccctaaaatacagacactgcctctcaccagagaccatcagagggcattgtttttagaaggcttgggattttagttgcaaagataccccctacccatcctaaaggtgcaaattctcttttgggcaaaaagccccttaagaacagcaggtcactgaaatccaactcaaataggcatacacaaaaaattcatatgtggtttgcataattaatagtttggtggccaggtgtggtggctcacgcctataatcccagcactttgggaggccaagctgggcaaagttcgagaccagcctggccaacaatggtgaaaccccatctctactaaaaatacaaaaattagcttggcacggtggcatgtgtctgtaatcccagctgcttgagaggctgaggcaggagaattgcttgaacccggaaggtggaggttgcagtgagccaagattgtgccactgcactcccgcctgggtgacagagcaagactccatcttggaaaaaaaaatagtttggggtgaggggtttcaggcatggctggatccagtagctcaaatcctgtcttcaaggctccattacttgcactgttttctgcattctacacacacacacaggcaagtccctctctgtttgctggtccagttttacatcctgacagtaacagatcccaggttatttttcccactagcttttattgacctgaattggatcatgtgatggttagtgagtcactctggccaaggagaagtggggagtagaatatactgattggccagacctggatcattggatcatgagcctatatctggaactggagaggagtagggccaattcttccatatagagtgaaggggcaataggagaggtcgccaaaaataaaatcaggaccgggcttccaggagaagaaggaacagatgctctgcagacagaagcgacagctgaccccatgacattctgtgaatgagacaggtaggaaacttgtgtattcaacacactgtagcaggagtccccaacccctgggccacgggccagtaccagtccatggcctgttaggaacagggctacacagcaggaggtgagtggcgggccagtgagcattaccacctgacctctgcctcctgtcagatcagcggcggcattaaatgctcataggaacgtgaaccctattgtgaattgcgcaagcgagggatctaggttgtgtcctccttagaagaacctaatgcctgatgatctgaggtggaacagtttcatcctgaaactatcccccctactccagtccatggaaaaattgtcttccatgaaactggtccttggtgccaaaaaagttgaggaccgctgtactatgggaaagaagacaatgacattagaggcagggaaaaaatacgattatgaggaagtcggtggggctggtatttgtgggtatcttgttattgttgtttgattgagaaaagaattgtaaagatgcgtaacacgtcaatgctttgaaaaagaggaaagtgttttgtgaggtgtaatgtattatgcaaacaaaaggcaacgtggaaattaccactgaagaccgaagatagtaaatccttattccctcgggatctctggtttttatagagagattaggttttgtttacctgttttaaatattaaactttcagttttgtgccttagttctttaagagaaagaatgtatgtctttatataatgtggatcatcagctccatttgatctaaagctaaagctctctctaaatcttttatctgactcagggctttgctgatgtgtctgcacttagcctctgttaagtaaagaacggtgccacagacggaaactggctacagagaacaggctccttggggtgtccatgagaaaattctcctatcccctgataataagagtggatcaaaaaaggagagaaaggattaagaagcaaaaacctcattgtggctgcaggaagcaaatatcactattcccctctctttctactcccctctctttctgtcccagtcaacagtttgtgaaatttctccatgttcccaccacactccccactccatataccccaggaacgctggcctcagttctggtccttcgaagattctggtcctagtagattgaaattccttgaaacagatgaacctcatctaggttgttcactgctgtttgcttataacctagtctcttagtccatttaggctgttataacagaataccataaaccggtaccttatacacaacaggaattcatttcccacagttctggaggctgagaaggccaagatcaaggcagtatcagatttggtgtctggtgagggcctgctttctgattcatagatggcaccttcttcctgtgtcctcaaacgacagaaggggcaaggcaattttccagggcctcttttataagagcactaatcccattcttgagggctctgccctcttgatgtaatcacctcccaaaggccccacctgtaatatcctcacattgctaattaggtttcaacacatgagttttgcaggaacacaaacattcagaccacaaacattcagacaaacattcagctacctagcccggtagctggtgtgaaagaggcactcaatagatatttgttgaatgaatgtattccctcatcaatgaaatgtggtatcactcatctttttagggatgtgttgctttgttccatttcttttgtgtgtatctgatctctagtgaaatgatgaggttgagggggtcaaccactagaataaccccagagcttctcagcctcagcactactgacattttttatccagataattctttgctgctgggagttggcttttacattgcaggatatttactagcatccttggactttatccactggatgccagtagcaggtatggatgcatgtgcatgcacacacacacacacacacacacacacacacacacacagttgttacaaccaaaactgtctgtaaatattgctgatattccctaggttctacaattggcgttggtagagagtccttgtactaaactagcatcataataagcaccaaatgagtgctcaatgcagtcttgttggatgagaaagtgcacttcagttttacctgcctcgaggattttagaccatcactctcctaaaatcttgcacctttgctaatgcttcagttcactcctcaagcacctgatgagcacttgtgaaatacaggccctctgttctgggcactgaagatccagaacagcatgatccagtcctggactcaaagaactcatgtctatcaggggaaatgaacaaaaaatatcaggctgtgacaggtcctaccatgaaggccacgatggaggttagggcagcaccaaggaagggggcggtcaggctggaagggcaggggcttcataaagcagaagctctgttttgttccagccacactccagaacaaagagcatgtcctggcccacaggagccactcaagaaatattggctactgaaagacctccaggaggagcagggattgaaacaccaaaagaaactgataatcttggcggctctgaagatattgcatcgggggcctgtttttatcctaaagagagagatgagtaagttggctccatcagggaatctggaagtaaatcagggcccagactggttttgggggaaaccaatggtgaaccctaggtgagaaaagatactccatgtcactacaaacccaaaaaatgtaagtgaaagcaacagtaaattcctttggaaatgttggaaatgaagaaagtgtgtccactttggttggattctggtactctggaagtccgtataaatccctaggcaagctcaatacataaatgttaataataatagcagctaacactaaaatattaatttgttcagtacattgttttgacaattacttatttcccatgactcatttaatctccacagaaaatctgttgggtagctattatcatcatctatttcttactgatgagaaaactgattatcagagaattagcttttcctaaatcactcacctagtaaattcaagagccagaatttgaacctaggcagtctgcaacaaaatctgtgctcttaaccacagttataaagggtctgaaaataccaaaaggactttaacatcaaagtcataaccattttaaagaatatagaagagttgggcatggtggtacatgcctataatcccggctactcaggaggccaaggtgggaggattgcttgagccccagagtttgagatcagtctggcaacacagcaagactctgtctcaaataataataataataataatttagaggaaaagacagaataaatataaagatggagaatttcaacaaaaaaattaagaactctgaaatggaaccaaaaggaaattctagaactaaaaaattcaatatctgaaattagaatctcttgggtgaacataatagtagaccagacttaaaagaagaatcagtaaatccaaagtcaagttgataataattatctaactgaagtggaaaaagaaagaagtgtagagcaacatcaaacagtcaaacatatgtataattggagattcagaaggaaagaaaagaggcaatagagaataaacaatattgacagttaaaatggctgaaatttccccagaattgattaaagacattaagccacagattcaagaagctctatggcctggcatggtggttcacacctgtaatcccagcatttttgaaggctgaggtgggtggatcacttgaggtcgggagttcgagaccagcttggccaacatggcaaacccccatctctacaaaaaataaaaaattaaccaagggtggtggtgcatgcctgtaagcccagctactcaggaagctgaagcaggagaatcacttgaacctgggaggcagaggctgcagcaaaccgagattgtaccactgcactccagcctggggatgaagcaagaccttgtctaaaacaaaacaattaaaaaaaaaaaaaacaagaagctctgtgaatgctgagtaggagaaatacaaaggaagttacatttaggtacattacaatcaaacttctaaaaatcaaagatacggagaaaatctttaagacagctaaagaaaatatatcctatacatcagaacaatcagaatgatgggtgacttctctcagaaatcatggaaatcataaggataaaaattgtattttcaaagtaaaactgtgtctgtcccaaagggttaaagaagccaatgactaaattcttgggcttacaggataacagatttttaaaacaaacaaacaaaatatctgatttttaaaacagatttaaaaaaaacaaaaactgaaactgtgctcttaaagagtaagtaacaagtaactaacaaaaattcttgactggatgcagtggatcatgcctgtaatcccagcacttcaggaggctgaggaaggaaggtcacttgaggctaggagttcgagaccagcctagccaacatagcaaaaccctatctctaccaaataatacaaaaattagccaggcgtggtggcacccacctataaacccagctactcaggaggctgaggcagaagaatcgtttgaacccaggaggcagaggttgcagtgagcagagatcacgccactacattccagccaggacaacagggtgtgagactctgtctcaaaaaaaaagaaaaagaaaattgagttttcaagataacagataagaagaaaaaacaacttcctgaaatgctgaaactccctccacttataaaattttaaaaccggctaacatcagttagaaccaagatggccagctagagtttacacagatgcgcttgctgatgtcacagcctaaatttccaccatgtttcacactaactcttctccaaatttacacgtgctacccgtgagttaacataaaagaaaactacacacgcccaaggattttccagacctcccgttttctttaccaacacttactaatcttgaaatccacccactgtatttcctaatgaaaatactgccttgaggttggcacaagaagacagatttgaatccgactcctatcttcttgggagttgactttcaatataaaacctctattttctcaaaaacctgtgacataatattgacttctaacgcattacgcaacaagctccttttactaaagtaacaaaagtgctaggggattaataaaaacatactgccaacttggatttctatatccggtataaataatcttcaaaaatgaagttgaggccaggcacagcggttcatgcctataatcccagcagtttgggaggctgaggtgggtggatcacctgaggtcaggagtttgagaccagactaaccaacatggagaaaccccgtctctactaaaaaatacaaaattagctgggcatggtggcacatacctgtaatcccagctacttgggaggctgaggcaggagaatcacttgaatccaggaggcggaggttgcagtgagccgagatcgcgccattgcactccagcctgggcaacgagagcaacactccgtctcaaaaaataaaaaataaattcaaaaaaagaaaaaaaaagaagttgaaataaagatatttttcaaacaaataaaatctgagagaatttgataccaacagatctaccctattaagaaattataaagaaagttcttcagacttaggcaaaatgatctcagacgaaagcacacatccacagtccacagaaggaatgaagaacagcaagaggataactatgtggctgaatagaaaacactacttgcattaaaaagcactgatctaaagtaacaagaacgacaatgtattgtaagttttattacatatgtagaggaaaacatatgacaataatagaacagacaagagtggaaaatggaattatactgtcgtaaagttcttattaggcacatgaataagtatggtactaattgaagattaattgcaacaaattaggaacgtatagatgcaaagacaacagaggaaatacaatggagtaatgaaaaacacttgattaatcagagacagaaaaggaagaccaaaagaacaaagattaggtgagatgaactaaatccttcacttaaaaggcagagatcagcacacaagattaaaataagaaaaccaatgaagacctaaacccaactacaagctgtttacaagaaacagacttgaaacagaagtgaaaaagaacaaacagtccatgaacccaacaacatggggaatctcaaagcataggtgggcaaaagagtgcctacttatgatgaaatttatatgaagctcaagaatgaacaaaaaattaacctacaatcatcaagtattagggaagtcggagtgtagttatcttgggggtattatttactgcaaaaggccacaaggggatttttttagtagcaaaggaaatcttctgaattacaaagatgagtatatattttaaaattcagcaagctgtgcatttaagatttgtgcattttgctctgtgtagattgtacttcagtgagtgtgtgtgtctgtgtgtgtctgtacgttctcacggctttccctgcagatggggtttaccaggacccagtggttgacatggaattggtgagtggatagtttactgaggtgtctccagcatagcatgtgtgaggatgctgaggaggcaggggagggaggagggagaggcggcagttacaactaaggcctcagcagatccaccggacctggcagtgggatggcctttcagacttatgcatggttgaggacaggggctgagtctttgcactcctgagtcacccagttgtgggatgctggctgcctctagggagaggtcgcagcctaggtcatggcagcttcctttataggttggcaactcctggcgagggacactgctgtgagctgtctgcagccaacactcctggctcctggggcaatgggcaccaagtcccaaagggaagatcaggtggcaaccacaacatcccctacaacctccctcatccaagccaccagcctcattcacctggatgaatgcaacaagccccactggtctccaggtactcactctgtcttcattaggattggttcaccatactgatgccaggggctgtttaagagagcaagtcacaagcatgacaccctgctccattccttcagtgtctccccatcctgtctggatggaattttaatttttttaaatctttattattattattatttgagacagaatttcgctcttttgcccaggctggagtggcatgttctcggctcacagcaacctccacctcctgggttcaagcgattcttctgcctcagcctccggagtagctgggactacaggcgtgcaccaccacgcccagctaatttttgtacttttagtagagatggggtttcaccacattggccaggctggtctcgaactcctgacctcaggtgatcctcccgcctcagcctcccaaagtgctgggattacaggtgtgagccactgtgcccagcctggaatggaattctttactctggctatgaagatccagctggctcactccattcagccacaccccagctcagggggctttgtgcagaacagggtgaccaagtggccctggtttgcctgggacttcctggctttggcactgaaaggaggagccaatccacctgccctcaaagcccagcccatggtgggaagagggcagcagggtctgagctttgcattccctcattcctgggagatggttcccagggagctcagagccccagaactgtgcacagggaggggacacattttctgtggctgggcagtgattagaacttagaaaggcatgctgaggtgtgactgcagccgaaggagcgtggctccctccctccacggtagttagagccacagtgcattctatccaccagggacgccaggagcttgaatctgtggggatgtgcctctcctggagccgaatctggctggcatatcagggccaggcagttctccaaaacatgcctaccagttgtcccagggccagcctccctggatgtaagccttactgattctgatatttgcaaagaaataaaataggagtgggaggagatgaaacaaactctcctgtgacctcttctattctagagttgactttgacacttcgagtcgcactcagagcatctcaattgtgggtgcctttggcatttcgtgcagggcaattttcattgtgtggaactgtctgagatactgcagaacatttcatgtccctggctcatgctcaatagaggtcagtagatcacttctttccctaaccactgtgacagcataaaacaccctcaccccttcccactcacatgggtttgcatgcaaatctgacacttaaaaaatgcctttaaaactaagtgggggaaggaggagacatgctcccaacagcattactagctgggcagggctctccacagggtgccaacccatttagttctaagctctcacacctgtcaaagaatctcattaaatcttcactatttctgcaaagagaagggaaggcattcagtatcctaaactgagacagttataacaaaatgtgagaaaaggagagagggattcatggtacccagccagcagacgttcttggagcacttactccatgccaggcactatgcctgatgggtaatacaagaagaataaagggcgctgccctggactcagggagctcactcctcctctctgggcaacagagaaaagtcacccactgcagcaaaagccatgagaatatgctcagtgataaggcagtggcgttaaatctgcaggcagtgggctatctgtgggtccttaaatctatttagtgcatcttgaacagtatttttaagctgggataagtggaataggaaggagtggagtggagcatgatggtatgggatgggatggatgggatgggatggatggatggatggggtgggatgggatgggatgggatgggatggatggatgggatggatggatgggatgggataggatggatggggtgagatgggatggaatggatgggatgggatggatggatgggatgggatggatgggatgggatggatgggatgggatggatgggatggatgggatggaatgggatggatgggatgggatgggattggatggggtgggatgggatggatggatgggatggatggatgggatggaatggatggatgggatgggatggatgggatgggatggatggatgggatgggatggatgcaatggatggatgggatgggatgggatgggatggatggaatggatggatgggatgggatgggatggatggggtgggatgagatggatgggatggatgggatgggatggatggatggatgggatgggatggatggatgggatgggatgggatggggtggatgggatggatggatggatgggatgggatggatggatgggatgggatggatgggatgggatggggtggggtggggtgggatgggatgggatggggtggggtgggatgggattggatggggtgggatgcgatgggatgagatgagatggatggcatgggatgggtgggaggggatgggatattatcagatggcaaaagtaagaagtgttcatattttgtcttcaaaatataaatatgagtgcataatggcttgtgatgcaaaatacatttcttactaaagatcatggacaaagcacttaaaaccacacagtgtaagggactacagtcccttaggagctgcttttgcaataatttacctgaaaactggtatgaaaatgagtcatgaattggacacttgatgtcagattttttgaataattttagttataaagcaacctcacacaccacaaacgcatttttatatctgattatttagatgattcccccaacaaccctgggaggtggcaagataggatcatgcttctccttgcaaagctgagacgatggggacttggcaaggctgagagactctctggaggttgacagctgagaggtcagagcaccagacctgggggtcccacagcccagctcccagtgtggagggtcctgctgtgcccactgccaccaaaaacacagcttcgcccagcatcatgcagtatctgccacacagcgtctgtctgccacatggcatctgccacctgaactatctccaggcacctctgcagttacagcaacaggtaggttgagggcattcaatttgttttttgtttttgttttcgtttttgtttttttgagacggagtctcactgtcacccaggctggagtacagtggcgcaatctcagctcactgcaggctccgtcccccagggttcatgccattctcctgcctcagcctcccaagtagctgggactacaggcgcccgccacctcgcccggctaatttttttgtatttttagtagagacagggtttcaccgtgttagccaggatggtctcgatctcctgacctcatgatccgcccacctcggcctcccaaagtgctgggattacaggtgtgagccaccgcgcccggcctcaattgggtttttgacaaaagactccctaccaagatttcacgggcacaaactctccacacttctatcctgagagaaaaccttcccactgtaacttctgactctcggttgttaatgtgtttggctgtcagttcctaaggagccatgtccatcgagcaggttggatggcgccaccttggcagttccttccagcaccctccaggggcagtgcgtcctgctcatcctgcaggtgttttttgagcaatgctcagtgccaggcacagttccaggtgctagggatgcagctgggccccagtccctgccccatggacctgacactcctgacactgcaatctggctgggggaagcaactcttccaagggcttttattccaacacagcccatggcccaccgcccctcagactaaaagagaaaaaaaagtgaaatgtcaaggtttctccagaaggagagcacagaaggaaacacgcagattgaaacgctgtcctggctggggatcggcaaacatcccctccacccttgtctatgttcagcgctccaccccaaccacaggagtgtgtgaaagagggtcttttccatctcagtgtctgtctgaggggcacagcgccctggtttgctgatttgggggtgtcggcatgaagtggactcagtggagactgagccaagtcttgagcacagatggcttcactcttgctgggaggtcagaagtttccgtgatgacctgtgtcacgtgtgttcattacaccacgaaatccatgaccttccagcaagaactgaggcttagacaggctgagaaacttgttcaaagtcacaaaccagggtccctggtgggcttgggatttgaacccagagtgactggcctcagggccctgacacataaccatgacaatagtccccagagtccttcctcttcttagagcctgtattagtccattttcacactgctgataaagacatacctgagactaatttataaagaaaaggaggtttaatgaactcacagttccacatggctgggggggggcctcacaatcatggcagaggatgaaaggcatgtcttacatggtggcagacaagagagaatgagagcagcaaaaggggaaagcccttataaaaccatcagatcttgtgatggttttatcttattcactaccacaagaaccacccccatgattcaattatctcccacctggtccctcccacaatttatgggaattacgggagctacaattcaagataagatttgagtggggacacagccaaaccatatcagagcctgtggttcatggacccaacccaagcatctctcccacagccccacgttacttaggattaagtgtaaaggggagacaagccagacatttgccatcctcagtccaaggaagcagagcaagcctcagtttttctggaatatcatttattgtcaggacagaacacagatgtttccatgtctgagcagtcatttccctgctccttctgaaaagaagccatttaatcatcagagatgccctagaggtccagtgtaattgtgggttggtttaaaagcggctgctctgacctccaaggacatctgctaacatggtgtgcagtcactcacactccacgctgctgtgtgcttaaacgctgcatgaggatttattcatttgttcctcacaatagttccataatcatccccattcataaacgcagaaacaggcccagaaaggctaattaagttaatgtgtcagtgatagagctgagatttcaacccaggaagcctggtgctgatggggtccacacacttcactacaccatgtggcccttgaaatgtgtcccaggttccaactgcaaggacatctttatgggggcagggcttgaagtcagtttttccttgggtcctgcagtgtccatcaggaagggtgaggttggctgtgattcagatttcagcttagctgctgtctttgctggaagtcaccccccaagacctgtctcaagatctcctccacctcctccttcaggactcaggtcaaatgtcctcccctcatttactgagtccccaccggtcgtcgctccaccacttcagcctggttaagtttctttctagcacatttcactgtccaaagtcatcttgagtgtcgctttgacttcttgcttgttgcgtgtctttgactgcgagtgtcaggtccatgggggcaggaactggggcacagctgcatctgcatccctagtacctggaaccatgcctggcacaagcattgttcaacaaacacctgcaggatgagcgggaggcgctgcccctggaagatgctggaagaaaccgccaaggcggccccatccaacctgtgcactgaacacaggaagccacaggagcagggggcatgagatggcccctgaggctgtgctcatgaccacccggtggcactgccacacaggcacgccaaccacttacctgttacgtgaccttgagcaagttttttaacctgtctaggcctgtttcctcatctgtagaatgacgatagtcatcatagagtaactgtaaggaatacatttcctgagtccatccatccacatattcatgtaacatagcatcacgtgaatgtgagtcatgatcgttcaacttattgtcatcgcccaggacaaggacggcctgaaattcttgagactggtaagatttgcaggcagaacctcaaaagtggtggagggagacccatccacactcatcacagtcatcactggggccgggagataaaccactgagacctcttcagccttgatctgccagccacagctaagaagggagccatgctcctgtgttctggtcccaagggactttgttgggatcctccccatcgctatttgattacacaagtgacagaccccagtaactgccaccttccaggcctctagcctcgtccacatttcccttcattgtgagctcctttgctcctgtcttgctggattcttcatttcaaacatcccagtgcaaggtcctctggaaaccttgaactgtgtctgttgcctgcattccttagaaagcaacccagcaccggcgagatcttcacgttctcactgttcagaagcacttcaggggaggggtgccgccggtgactcctgtctcaattcttccccaaaggcctggagatgtaggagagctctggaaattacacaaggattccacaacagcagcacaatagcccgtgattcgaccaagatgtcaaaatcagcatgtagagggtgcgattgaaagtgtggttggcaccagaacatcacttttaattgagcctgtgcctacatttttgcatgcaacatggaaattaacagcagagtgataaaacttcgagaaaaactaatcacccttgctgtctgctcctgcccgtcccttgtttaacctgtactctcctgcccccgactccccttcccagaagggtcctggaggtttctatcacaggccaggctgctacattcacaacacatcccagctcagcccagcccctccagggctctgagagagttgtctcccaggcccatctgctcagacataaccccatgaaaagagctcagtgtggcagccagggctgtgttgactgcagaaaggacagaagatgatggggtgagggtctgggcagtcgggggttcgtgcattgtgtgggtctcacacgtggcttccctccaacaagccctctgcattcctggtcagacgtggggaggaagggagggaggggagaaagtgaggcagcagagctggggaggggcccaggttgcagggacttgtgtgcagggcacgagatgtcactgggggcttcctacatgagacacagtgagccgtcaggattcagggggcatgttctgagagaagagcccaggggaatacgggaaagaggcaacatgagaatccatcagccaccaccccagtccttccctcctctgcccaggaccagagctggggcctgggagacagggcgggctttctgcaggagggacacccaccctgagaggaactcaggctgtcatagctgcacagacattgcaagccaggagcagtggtcacaccagtggggcaggggcatcgggagggggtggaaacagcaggtcacccacgggctgtaagcatctatctttgaggtgaccgaggggacccaaagcaagtgacagagatgcatgctcctcagcaagcctgagaggtctctggggacagtgggtctgggggcaggaagcagcagggggctcttacaggtgccgcatcgagatctggccacttctaccatgagcagcaggcactccctggggattccatgtcctcagcctctggttgaagggcttcccagcctctccctttctctgttttgggggatttgggcgggtactggcatctccatctgtgcactcctgacccctgagtgacgtaaagtaggccctccccttagacacatttcagtcctgtcccacatagcccgggctcagggatgtggccctatcccggtgtctcgggaggaaatggggcttgaatttctcatgagacaccagacacccggtgtctcacgtgctgtgtaagaggatgcttggcgctgcgacctccttgcaataaccatcatctaatagggccaggagaagtggaggagaaggtgccattaacggggtagccagttgttcagaagcagccccttcctgcatgggagcacccctcagaggtgtccaggcagctccaaccagcagataatgggtgtccggaatgtgcagagccagcccagatctcagcagggataagtgatttgcaagaaagaacttgttggattgaggagctgccatgagtcccagcggcctggcattttctcctggaggctgtttttagagccagactgggggcggggctcccccttggcctctgtgggcccctgcagtctgcaccaggcttggagtcaccaggctgatttcacggacatttacggagcctgcaggagaccatagcttagcatgtcccctgctaattaaaggacagtggccagttgttctcggtcagagtttacaaaggatgattgctttgtaatctggagtgtcccagggagcagatgggagagcgtcagatgccaaaacctgatgcctgacacctggcattctttggaagtgacccttcgaggagcatcagccattgtgggagagacgggtatcagggggccgccctcctggctctcaggggctcagctccgcccacacagggcaggaggatgatgcctgaaactatgcctgtcctcacacaagagagattggggtctttgcatggtgggatgtgaatgcctgggggtcaggggacccatgtagggctggaagagggggtcttggcctcaggaccagccctgcttcagccagtgtagccatgtgtggaagtaccgcccagcattgcttgacttccctggcagccaggacagcctgggtctgagtccctgctacagataaaaagaaccaaatccaaccatttgtctccagccattctcagcctctgcctctctccccagcccctccacccctgtgttcaaggaaggcagagcccagaacctgttgtgtgaggccttgggctttccacggcctgatgagtgccagtctctggggagccctttgggggacacattcagattctcacaattatctcatacccagactgcaatctgccatccaccagcaatttcaggactgcgggggagggttcatcaaatttgcaagtgtgtttgtttctctttttacccaacattctatctgtgagatgctttataattcaccagatgtaatatacctttgggattaatattccatgttaaatcctttgaaagcaatcaacaactgtaatccaattactattggctgtatctttcacgctattttgccccaaacctcaagccaagctcactatacacatacacacaaacacacacacacacacacaccccacagcagatgccaattttgtgcctcgttgcctcacataacatgggagcattgagtagtgaacagctgatctgcatgaattaacgtgggaggtcgtgtgggccctgaagctttcacacttacaaaccggtgtcaggatgggttgtcatagagatcaggtgggaggacactagggttccccccaagactctgggcctcctctgatgagcaggtcacatggggatctggggggaggcacaggcacgaactgcatattaaatacacctgactcactgtgtctgtgagtgtgtgggcgtgtgtgggtgtgggagagtgcatataggagtgagcatgtgtgtgagtgtacatgtaagtgtctgtatgactgtgtgtagtatgtgtgtgcaagagtatatgtatgagggtgtctgcgtgtgtcagtgtgtgtgcaagagtgtgtcagtataagagcatatgtatgtatgcaggggcatgtgtgtatatgtaagcgtatatctgtgtgtgagcgtgtgtatgcatgagtgtgtgggcatgtgtatgagtgtatgtatgagtgtgtctatgtgtgtgagcatgtgtctatgagtgtgtctgtgtatgtatgagtatgcatatttgcatgggcatgtgtacatatgcatgtgcatgtgtgtgagtgtgtacacatatgagaatgcctgtgtgagtgcatgtatgcatgtgtgtggtgtgcatgggggcatgtgtatgtatgtgtgtgcctatgtgtaaggatgttcgtttgcatgcacatgtgtccaggtcctacatgggatgaaaactgaatggctctaaagatctgctggacacatttcagatcctaacagagctcttaagctccaaggggtcactgaatggacggacaatgagggtttctgagtctaggcagcgctgactcagcaatgcaggaaggcagctcttggagcttcacaaataacccccccaccccctttctctccctcacagtcacagacccctccccacgtcccttcctctccctctctctgtttgccttccatgcgtctccccttcctggtctcatttctcgcacattcatcacctcttcgtcctgcggtgtaattcccctccactcctcagcgtggactgtgggatgagacagccgcagccttgcaacctggccgcggaaaatgcttgacactggtttgtacccatttctcagtcttgggagcccaccccaactcagggaaaatattcacgtgcatacatacatttggacataatacatgaatcatatacaaggaatgttcaaacaggccgcaatcaagccctccatccagtgtttagttttggtttcccccaaagcagaccctgaggcaagctttcaagttcaagtagtttatctgggaggtcatcacaagcaataccagttggggtgcggggcagggaggtcagcaaggtggaagccaatatggcattctgccttctctgggaaatggcccaggcatggtctgcaagcccatagagcctggccttgcagtgccagccaggagatgggcctggggcaggggcggccatgcctaccacaagcaagttaccaatgtggtaaacaaagcacagcctttcagggccctacagcatagaacacgtacctcagaggtatcgatctaagggccacaggggctggggcccacccccaactccatcaggcgctgctatgggatcccctggaagcattaatttcccagcacctccgtctctcccatgcagccccgaccctggcagcaggagacacaggtgctggcagcccaagttggggggcaggagcacagcaggggaagggccaggggacagggggacctcgacagggtctgccacatgtctcagctcaactgagggagaccccctctctggggaaacctcgctgttgctcacttcctgccttggacccgtccccacccaccagcaactctggactttcccacaaatggctcgggctccatttcccaggggtaagtctgggttcctcagcccttgagcacagatctatgccagcactctccttgcacgagggcacatcagggatcaagagaaaaggctccttcccttggcaaggcagacataacagtagggcaggcaggcgagaggcagagaaatccaaaatcacgaaggtaacgtcagatggtgaccagctatgaacagggtagagcaggcacgtgggataaacagagtgacagtggacgccagagcaggttgaccagggaggaaatgaggggagaggcccggggagctgtccacgtaccagtcgtggtaaaatgtcaccggacctctaatctgccatcttgctctcttcgcctttgtttttcaggctttacaatctcatccccaaaataacagagcacagacctgcccggcccccaggtgatttttcttggtgttaccctaaggccgtgagacagagattctcttaacgtttttagtgcggccccttgcatgaaacccgttgcaaactgccacccagcacacacacgcacatccatttacacagaaatgcagcatgtttccccaaacggcactcacccccgctgcacacaatgcgctgatgtctcctgacctagtctgttctggtctattgcagattttcaatgccgggctcgacactctaaattgatttcaagacccgctaatgcgtcacagcctgcgatttgataaactccacgctaagacacatcccgttgtgaggtgttcgacccagaggccatttatcctgcagtgagccgggtggggggggcaggattcaccctgaggcgcgtctcctccttctcagtcgggctgggaggagggggctctgtgccatgggacccgcagaggtcccggtctcagagttcgtgccctgtagctgctgtgtgtccagcagctggcagggcgggtgggttgggggtgggggtgtcactcccacagacacacagcacagggcagaaccctggctggaagccgctcagccctgggacctcccgagcccacctgggatcaggccctggggaacagctatgggggacagggactcccagtgcacagaacaggccatgagctggacaagctgctccttctcataatgtcagacccttctgctgacccacctaggaccgggagcttgcagacaatcctgggcccagagaagcaggcagatgtggctgttggtagcactaatatgggttgtgaatatcacctggtagttattattactttacttactttaccccagccacttgatcctgcacacatcccctcacttcatgctctggatgaagttggggacccctggatgagaccacaccatgggcctgaaagtcacgggaggaattatattagatgtggtggtcttggagggctgctaggaggaggagaaatgtgtagagagctggatggactgagtgatgagcaatacacatttctagaggaagagagtgcaggcagagaaaacagcaagtgcagagtccctgcgctgggaaaggtcagtgtgaccacagtggagtgacagagagggaggagaggaggtctgagagctacctgaggcccagatcatgtggggctctccaggccacagccaggagtgtggatctgcttctgagtgagggaagaagccattggaaggttcagggcagtgagccgagatgtgagtgacatgatctgatttgcatctgcctccgtcatgactttcgaaatagctgcatctcatctatattctgatctagtcaaaatttatctctaaatcagttacatttttagaattttttaaaggaactttgatattccactactgcaaatgaaaaatcagtatcacttccatgaatagaagagtatccatgaaaacacacaacaaaaacagagccgtgttattactttctagccagaggctgctaaagacgatgcacctgaaacctgtgctccctttgtaaccacccaaggggttcaccttgcccactgcctagactgagccgacttatcaagacaggggaaattgcaatggagaaagtaacccatgcagagccggctgtgcgggagactggagctttattgttactcaaatcagtctccctgagcattcggggatcagagttcttaaagataatttggtaagtaggcgctcagaaagtggggagagctgattggtcaggttggagatggaatcatgggggtagaagtgaggttttcatgctgtcttctgttcctgggtgggacggcggaactggttgaggcagatgaccggtctgggtggtgtcagctgatccatcaagtgcaggggctgcaaaatatctcaagcgctgatcttaggttttacaacagtgatgttattcccaggagcaatttggggaggttcagactcttgcagccagaggctgtaatttgttagtcctgcaaaggcagacggctccccaggcaagaaaaggctataaccaattttgtttgagtcaaatcatgaactgaattctttctcaaagttagtttggcctgtgcccagcaaggaacaagggcagtttaaaggttagaagcaagatagagtcagttaggtgtgatgtctttgactgtcataatttcctcagttataatttgtgtgaaggcagtttcacctttgtctctctcaagcagtagagaggtattgaagtcacatgagcattgaactgaaactatctccatgactatctcagagagactgaaagacactgggcaagggaatacatttcacactgtgggattccacagcgtttcatgctggttcaggaaccacccaaaatcatctcacatattcacatatcattttttttttttttttgagacggtgtttcgctctttcacccaggctggagtacagtggcgcgatctcggctcactgcaacctccatctcccgggttcaagcgatcctcctgcctcagcctcctgggtagctggtgttatagatgtccgccaccatgcccaactaatttttgtatttttagtagagacggagttttgccacgttggccaggctggtcttgaactcctaacctcaggtgatccacctgcctcagactcccagagcgctaggattacagctgagagccacaacgcctggcctatctcacgtatctttggtgggcacccctccactctttggggaaacaccattttgaaatacagtatattttcaatttgatatttaaggtcctcaagggaacaaaatcataagatttttatcttttcctcctcaaacacatggtggtaaatgcttcatagatattcatctctaccctttaccttcagaagccatggggatgttgctttggttttggttttgggttttgctggagcgtttgggtgtttatcttttgcatagttgtttaggagataaccatgggctacaggagaaggagagacgtttttgcactacttttctttcccctgaccatcctgatgggcataattgctactgcaccagcctcatcctttctcccgggtccactcctgccctttccagcctgttgtccatgtggcagccagagagctcattgtggagtgtgaaggtcacagtgccccctgctcagacatctatgatgctcatgacattgcacgaaaccctccttcctcatcatggcactcaagactgctccctgccagcctctctgtcctgctccaacctcagggcaccccaaacagaccttctctctgacctttgaacttgctgaacccttttccacctcagggcgtttgcactgtctcttccctctgccaggaacactgccccagagttttacacagctgtctttttctgatcctccaggcctcaaatgccacctcttcagagagatcctcctggtcacttcattaatgtggcccccagctgagtcactgtcagccccaggctccatttatctcctttacagcacctaccgctgcaggtcagagtctaattcatctgcgagtttgtgtcttcactgtcaccctccaccggtgccatgagatgggaacacgtctgtgccctgatgaagcccagcacgggcaccatgcctggcacggaggaggcacttaggcagtgcttcttacatatgcacctcagggaatggggccagcggtggtctttccaggttctctacccttccctccccacccaaatgtgtgacattcagagacagagacactggagtcatcctaactgctcccctcctggtcatcagatcccagacccacaggacagggatgtctgaggaggcccctctgggaggtgttcatggctgtgaatcactgtagaagggaacgagctgggcagctggtgcccttcatctgggtcagagccaggcggagatttgaagggaatcctttggcaaagagcaagcaaacctcccagggatggcgacttgtcagatgtcagcgagtctggaaaccagcaatcactcctaatccaagaatcagcctgagggggcctgaaggggtcctgcaggccttcatgtcaccttctgcagaccccatgttgaaaccccatgttgaaaccagcctcgacgccaggaatctctcattaggtataaatgtcgtcttaaaagattccttcacttcttccaccacccatcctgaagacagacaattaatctggcaaatgctgactggtgcctactctgtgccaggctgcaccctcagcataggggggatgtggaaacaaaacaagctccttgcacccctgagctcagcaggtcactggggaagactgttgctaagcaagtgacgacagaaagcagagaagtcatttccaacagcagcagaatgaagcagactcatgtgatccaaagtgtcatggggttgcatgtgtcagtgtgagcaattgggaaaggctcctgagggtgggggtttggagcagagacgtgaaagatgagaaggggaaaaagggaaagcgactcaggctggaactggtatgacagtgccatgtctgtggataaagagcaggccgtgtggacactgcagcaagcccagcagaaagcgggtcatgatggggcccgaggagccagcaggaccccatgaccctgggccacagtgcccatggtcaggtctgggatttcatccaaagcgtaatgggaggatttgtagcttgagaaattttaaacatccatttagctacggtactgagaatttacaacagggtatgagagaggaatccagaggccccttgaggaggctgttggcatccaccagaagagaggccagaccaggtgaccacatgggaatggcagacagagaaggctgatctttggggctttctagtgactaatttgcctcctctgagccccttctcattccttctcttgttctacacctagagcattttatttatttatttatgagacggagtctcactctgtcacccaggctggagtgcagtggcacgatctcggctcactgcaagctctgcctcccgggttcatgccattctcctgcctcagcctcccaagtagctgggactaacaggcacccgccaccatgcccggctgattttttgtatttttagtagagacgggctttcactgtgttagccaggatggtcttgatctcctgacctcgtaatccgcccgcctcggcctcccaaagtactgggattacaggcatgagccaccgcgcccagccacctagagcagttttgaacaatccatcatcaacccgaagaccattctgaagccccctcccctccacctcctcacagtctctgctgcagataaaatcgcacacacccgttaacctttctgctgagaagttatcatcagccctttcatcagtgcagcagctctcagccggctctgaaaggcttgaaattgtacatccatttaaatgcctcgcactttcctaggatttgttaatcactgtttttccacccaaacatgaaaagaggttataagaggtgttcgattgaaattgcctgtgtgtgacaaatgtcagagcatttccaaagctattctctttagtggaacctttttataaggcccagctcagtgtctgggattaagtaggtgttaagttttcttactgctgcctcacagattaccacaaacttagcagcttagagcaacacatgtttattatttcacagtttctaggggtcaggagtctgggcatggctcaactgggtcctctaccccagggggtcttgcaggtgatcatcaaggtgttggccaagggtggaggctcagcggacgaagccaccagggaaggttctgctcccaggctcacatggctctgggcaggagtcaggtcctggtaggcctcagaatgggggctttagtcccttgcaggctgttggccagaggtcaccctcagttcctggccacaagcatttttccaatatgacaacttcttcatcgaagcaaaggagtcagctagcagcaagacagaagtcacgaccttctgtgacataaccacaggagtggcatcccatttgattttccatattctattgcttaggatcaagtcacaggcctcatctacactcaaggggaaggggtcacacacaggcatgaataccaggagagggagactttggggggtatcttagaggttcaaatataaagtaaaacttgaagaaaaaattttaacatcaccactgacacaatcaactaaagatgagcaatgttattttggtgtatggcttacctggatggatggatagatgggtggatgaatggattgatggatggccaaatggaaggatggacggatgggtggatggatggatggttggatggatggatggatggatggatggatggataggtggatggatggatggttagatagagcaacctaataaaaacatatcacacaagacacacatgtgctttttgtcttatgaaaatggaatagtggttttaatacatacagatgtaaacccgcctcgtgtacactcaacaatattttatcaacttgacaatgagaactctgcatatcaacattattgttttttagcactggcatttatggatgtaccacaatgtattcaatgaattttgtgttttaatcaagttaggatgtgagtcagcttcatctagcagagctctaacttcaactaagacaaaagtgtatttttcacagaaaccaaagctggagcttgacagtctagtgtgtatacaaaatttgagggaccctgttttttttccagtgaactgttctgcacttcctaggatgtgaatctcaccttcacagaacaaattgatgggaagagcaccaaccatcacatccataggccaaggaggagagaggaaacaaaaaaataagaaatgaggcagaagatagatgtaaggtttcaaaaaatgccacacaacactttcattactttgcattggtcagaatctggtcacatggtcacagcttgctgcaagggaggctgggaaaacgtagcaagtgtccagccactggggagagaggagcaccggaggaagggcaggaggctaccagcaagcatttaggcttcctactttcttcttataaacatctttagagattcatctttgcatatttttctgactatttcctagggataaatgcctataaatggaattcaggactaaaagatatgcggcactttcactggccaattgccaattgccctctagaaaggttgtaccaatgaactcacccaagaggtggggttctatttcatgaaatgtttctccaccccacatttccttttaatccacaccctttggcctttattaggcttacacatctcttcagaatccttgcttcctacatcataatcttgggatttaatacatgtttttcgttcaggttattattaatatcagatttatctggctgtgtgtgagcccagccacagctttagggaaagagatgtatctttcagtggtgaagagaataaaaatcaaaaatcctcagagatttgaaactgaagtgggcagggaagggtggaaagaacagatctcattctatgaagagcatggagggattttcacagagcatgtagtgctgagtacagcagaccaagcacccggggacacccagagagcagcctttcctcaacagaagaggagtgagcaccacacagagttgcagaaagggaatcccagacaggggtaacagcagatacaaagacactacagcaggcactgacttggcctgctggaggagcagaaaggaagccagtgtgtctggagtagaggggaccaacttgtccaggtttgcccagaactctcttggttttaacactagaaatcttatgtcccaggaaacttctgagttacagccaagctgggatgatttgtccagaactgcccctgttttaaaatggaaaggtctgtgtcccacaaaccccctcagtcctgagcaagctgaggcagtaggtcaccttatgctggagaaatgtgtgcaagggtgggcagaacaagtgactctctcccatgtcctctctccccttagccacaggagtgacaaatctgggtaccgacatccaggatgaagactacatttcccagcatcccttgcagcaaacagaggtcatgtgaccaggctgtggtcactgggaggttaggcctgtgcacagtggctgcctttagaggaaggaaggtttgtgccctcttgttctcttctcccctccctgctggctggcaggagacaggatggacactgggcgggggaagccacactctaaggaagtcagactaacaagatagaaggaggctgagaccctgaaaactgcagagaagaatcacttgattagctttgactttcttgtgaaacaggaatgaacctccaccttggctaagccactgtgatccagggtccttggtcacattcactgaggccataatctaattggtagaaagaaaggaaggggaggggagatggagtcagagaggcaggcagaggtcagatcacatctggcctgtaggccaaggcagaggaagaaacaggtgacccaggactcaaggactgcacctgctcccaggcaaagggagtttgccctgggtgcccctccctgtctgctggaataagcaaattttacccacttcccttaggactttgcaagatgcacatcagtcacaggtgcttgtctcctaagggtcctttcaggtgagctgccccaacagtgagactgtgactagagcaggaaagaacccttgtgtgcatcccctctgagcactgggaggtgtggttgtagcggctgctgttactcatcctgactgatacacagacaccgctggtagccctctctcctggaaacgccatgtaagttaggtgaggcatgacccaggaaagctctcaagctgacttcccttctatccccagggccgctgagcaggacccacattatctaagatcagttggacacctgtacacctgcatggcctggagcaggtgccaggcactgtggatgatgaatgcgagaacggcatcatccctgccctcctgcaggtaactgtctggtctgctcagactgtgagattcctccacaaccacctcctcacacacagctcactcatgccaagcaggaagcagagcttgggatcgcctgacccacttgccctcacctgggagcaacttatgtaacaacacatgtagttcacacagggctgacggttccagcttccaagacaccccaaggcttccttggctgcttggtaatcagaccaggtatgtgcaaagaggcatgactctattttcacttaactgaaaaaaccacaccagcaaagagagcatccatgttcagtggccctttctccccccaatagtgaccattaacctttaaaaagatgctttatgagtcatttgccaaacctccttcttcatgccaaggtgtaatgaggctcataaataggccagacttgagaggggacaaacacgagaaatgccaccaatgagagccccaggcagagcaggtctcagggctgcccagccatgtgtgtgccaaacatggatgtgtcagtggccatgccaggagttaagccctcagccatgggcctctgggtggccaaggccaagtcttattcaacaggtgagttcaactgagccaaccgtggcagaaatacataggggagacgatggctcctctggttaaatcccctgctaattccacctggctcagaggaggaaccaagtcctcataatagcttgcaagtcccacctgactcggcctcctctcagctcagattctccgtgcccctctacccttctctgtctcctctcccaccacagagaggggatcctacaggttcatcctggtggattcaaaacccatctttgttacacagtcaccaaatgaatgtgcataaaccataaacagccctcttgaaaaagagaaaggcaggccgggctcagtggctcatgcctgtaatcccagcactttgggaggccgaggagggtggatcacctgaggtcaggagtctgagaccagcctggccgacatggtagaaccccttctctactaaaaccatgaaaattagctgggcattggtggcatgcacctgtagtcccagctactctggaggctgaggcaggagaatcgcttgaacacggaaggtggaggttgaaggagtagagatcatgccacttcactccaacctgggtgacagagcgacactctgtctcaaaaaataataataatttaaaaagaaaaaggcaaaaattatggccgggcacggtggctcatgcctgtaatcccagcactttgggaggccgaggtgggcggatcacaaggtcaggagatcgagaccatcctggctaacacggtgaaaccctgtctctactaaaaatacaaaaaattagccaggcaaggtggcgggcgcctgtagtccaagctactcgggaggctgaggcaggagaatggcatgaacccggcggggcagagcctgcagtaagccgagatggcaccactacactccagcctgggtgacagcgagactccatctcaaaaaaaataaaagaaaaaagaaaaaggcaaaaattcaaacagctaaacagaaactggacaaaagagttgaaccagcccttcacagaaggggaaatgtgaaggaatggccaacaaacacatgaagagggtctcagcctaacaggatgaggtaccacgtgacacccaccagactggcaaaaatcccacaacccaagaaatgcaagggttggggagaatggagagcaacaagaacactcagccactgctaagaaaggttgtgaacttttgttgttgttgttatgcttccatatgaaaggctgtgtgttgtgggttatgaggaaaattacatttcttaactgggatgaaattttaaaaattgaaagctactgaccagaagaaacttgcatttgtgtacaaaagaaatgcccaagaacgttctagcaacacagtcctaagggcccaacctgcccaaaccctcatccacaggaaaatgaagacatttcccacgttcccctcataccacgggcgatcacgcagcaatgaaaatgaaccatgtcagtgtggatgggtctcaggaagagaatgcaggacaaaaatagacatcgagcaaatgcaaatgctcagacccaatgcagcataggagcagccacacaggagaatttcttcacatccaagttcaaaactacagccgaggcaacagagcaagaccctgtctcaaaaagacaacagaaagttcaaacactaaatggcatattgtttagggatgtacacatacgtggtgaaagaaacgtgctatgaagaaaagtacgggattaataaagactaaagtggaaagtgattccctctgcagaagggaagggactgggattcgggaggggccgccagggaacatccacagttatgtctcttcagattctgttccctaaacttggtggaggtcctgtgtgtccagtgtgtcgatgttctttataccttgcccatattgtacaaatgcttttttctatttaatatttagaagacagttatacacaagatgcattaaatagcaagatggcagatgaacatcaggaaggaacattaggaacatccatggtgttccatccaggaaccttcaccatggaaacccctgtgctcatgggcctggtctcaagacacagtcagttggggatcagaggccacactcatcgtagcagagaggcaggaacagctgggcgagggtccttctgtgacatctactgcatcactgggctctgtgaagtgactcagctgccagaactcacacaatattctgcaccaaaacctcacgggaaaaatggtaagtttgaagtttctccattagtagcaactctcagattaatctctgtcctccatcgcttctccatgaaacaacgttttatacctttgcttgggtctatttttccatttattttttattttactaactgattgaaagatatatactgtacgtgtgtgattttgtctctatcagccaggataatcatggtttaattcctattattattattaccaacatcctttagtttttttaagcttttcaattcctaagggtaatcaagttctttctgcctcctgagacagaaaacaaatccaaactgtgcaagagaaaaacgaatgcattgatcactaggactcacaagttcccaggtttaatctgcttgagaaacagttacaccaatggtttcaagtggcatcctgtgattcattctctctctcctcctctcttctctctctccttacccaacaccggcaccatatttagcatcacgaacctcagacttaaacagcacaacaggctcctcccaggtctccagctacacaaccctcagacttaaacaacagcagcggcaccagctcctccctgggtctccagctccacaaacctcaaattagaacagcagcactggctacacccagtctccagctctacacctctaacttgaactacagccaccagctccttcctgggtctccggctccacagaccttaaacgaaaacagcagcactggctcctccccaggtccccagctacagaccctcaaacaagaagaacagcagcaccagctccacctaaagtctccagctccacacctcaaactagaacttcagcacccgctcctccccgagtctcaatatctgtgaccctcaaaataaaacagcaggaccagctcctcctctggtcttcagcttcacgaccttaactgtaacagcaccacccgctcctccggggtcaacagctccgacgctaaaactagaacagcagaccagcttctacctaaaacaccagctccgagactctcaaacaagaacagcagcactgacttctctcaccaggtctccagctccacgatcctgaaacttgaacggcagcacccgctcctccccgggtctccagctccacgaacctcaaacttgaacagcagcacccgctcctcccagcgtctccagctccatgaacctcaaacttgaacagcagtacccgctcctccccgggtctccagctccacgaacctcaaacttgaacagcagcactcgctcctcccaaggtctccagctctgcgaacctcaaacttgaactgcagcacctgctcctccccgggtctccagctccacgaaccttaaactaaaacagcagtactcactcctccccagatccccagctgcagaccctcaagctgcaacagcagcaccatctcctctccaggtctccagctccatggaccttaaactagaacagcagcaccagctcctccttgggacaacagctccaagaccctcaaactacaacagcagccctgactcctgcccaggtttacagctccacaaacgtcaaacttgaacttcagcactagctgaagtctccagctccctgaccctcaaactagaacagcagcaccatctcctctctgggtctccagctccacgaacctcaaacttgaactgcagcacctgctcctccctggatctccagctccacggaccttaaactaaaacagcagtactcgctcctccccaggtccccagctgcagaccctcaaactgcaacagcagcaccatctcctctctgggtctccagctccatggaccttaaactagaacagcagcaccagctcctctcctggtctccagctccaggaccctaaaactagaacagcagcaccagctcctccttgggacaacagctttaagaccctcaaactacaacagcagccctgactcctgcccaggtttacaaacctcaaacttgaacttcagcactggctgaagtctccagccccatgaccctcaaactagaacagcagcaccatctcctctctgggtctccagctccatggaccttaaactaaaacagcagcaccagctcctcccgaggtccccatctacagaccctcaaactacagcagcaccagctccacccaaagtctccagctccccacctcaaactagaactccagcacccgctcctccccgagtctcaatatccgccactctcaaacagcagcaccggctcctcccctggtcttcagcttcacgaccctaactataacagcaccacccgctcttccggggtcaacagctccaagactctaaaactagaacagcagaccagcttctacccaggtcaccagctccgagactctcaaactagaacagcagccttaacttctcgccaaatctccaactccacgacccttaaacttgaactgcagcacttgctcctccccaggtccccagctacagaccctcaaactaaacaggagcactgacttctgcccacatatccagctccacgaacctcaaagttaaacttcagtaccaactccttcccgcgtctccagctccacgaccctcaaactacaatagcaacactggctccccaatcccaggtctccatctccacgaccatcaaacttgagttgcaacactggctccacccaaattctccagctccaggatgctaactgtaatagcagcaccagctcctctgcaggtcaccagctccaagactctcaaactagtacagcagcactgacgcctgcccaggtttccagctccatgaacctcaaacttgaactgcagcaccacctcctccctggttctccagcttcacgaccctcaaactagaacagcagcaccagctccaaccaaagtctccatctccacgcctccaacttgaactccagcaccagctccttcctgggtctcatgatccatgaccctgaaaataaaacagcagcaccagctcctctctaggtctccagctccacgaacctcaaatttaaaaagcagccctggctctaacccaggtctccagctccaccatcgtcaaacttgaacggcagcactagctcctcccaaagtctccagccccacgaccctaaaacatgaagagcagcattggctcctccccaggtcttcagcttcacaaccctaactcttacagcaacacccgctcctccccaggttgccagctccaagaccctaaaactagaacagcagaccggctcctactcaggacaccagctccaagactgttaaactagaacagcagcactgatttctcaccaggtctccagctccacgaccctcacactggaactacagcaacagctccgcccaggtctccagctccagggaccttaaactaaaatagcagcaccagctcctctgcaggtccccagctacagaccctcaaactagaatagcagcaccatctcctctccagttctccagctccacgaccttgaaactagaaaagaaacactgactcccccccaccaccaatctccatctccaggaacatcaaacttgaactacaacagcggctcaacccaaagtctccagctccccgacactaactacaacagcagcaccagctcctccctggctcaccagctccaagatcctcaaaccagaacagcagcactgactcctgcccaggtcaccagctccaagaccctcaaaccagaacagcagcactgactcctgcccaggtcaccagctccaagactctcaaactagaatagccacactgactcctgtccaggtcaccagctccaagactttcaaactagaatagccacactgactcctgtccaggtttccagctccatgaaactcaaacttgaattgcaacactggctcctctccaggtctccagccactcatccctcaaactgttgctcctccctgtgtctccagcttcatgaccctcaaacttgaactggggcacccgttcctccccgggtctccagctccacgacacgtgaactgcagcacttgatccttcctgagtctccagctccatgacccttatacttgaacagcagcaccaattcctgcccaggtctccagcctcatgaccttcaaatttaaaaagcagaactggctccaacccaggtctccagctccaccatcatcaaacttgaatggcagcactagctcgccacaaagtctccagctcccatgaccctcaaatgtgaacagcagcactggctcctccccaggtgttcagtttcacgaccctaactattacagcaacacctgctcctccccaggtcaccaactccaagaccctaaaactagaacagcagaccggctcctacccaggtcaccagctccaagactctcaaactagaacagcagcactgacttcttgccaggtctccagctccatgaccctcaagcttgaaccgcagcaacagctccacccaggtctccagctccacaaaccttaaacaacagcaccggctcctccagaggtccccagctacagaccctcaaactagaacaggagcactgactcctgcccagatatccagctccacgaacctcaaacttgaactgcagtaccagctccttcccgggtctttagctccgtgaccctgaaaataaaacagcagcactggcttttccccagatccccagctccacgaccctcaaatttaaaaagcagcaccagctcctccctgggtcagcacctccatgaccctcaaacctgaactgcagcactggctcctccccgggtcaccagatcccagaccctcaaactagaacagcagcactgactcctccccatatctccagctccatgaccatcaaacttgaagactagcaccatttcctttctgggtctccagctccacgaccctcagacttgaacagcagtgccaactcctttctgggtctccagctccactatcttcagacttgaacagcagcaccagcttctccccaggtctccagctccatgaccctcaaacaggaacagcagcaccggctcctccctgggtctccagctcctcaagtctgaggatcatggagctggagacccagaaaggcaatggtgctactcttcaagtctgagggtcatggaactggagacccggggaggagctggtgctaccgctgttcaagtttgagcatcttggagctggagacccagggagccgccactcgaacggtagctcctcccccagtctctagctccatgaccctcaaactcgaagagtagcaccatttcctttctgggtctccagctccatgaccctcagacttgaacagcagcaccagctcctttctgggtctccagctctcctatcttcagacttgaatggcaacaccagcttctccccacgtctccagctccacgaccctcagacttcgacagcaatccggctcttcccctggtctccagctccatgaccctcaaactagaacagcagcaccggttcctttctgggtctccagctccacgatattcagacttgaatggcagcaccaacttttccctgggtcttcagctccatgaccttcagacttgaacggcagcactggctcctcccctctccagctccatgaccttcagacttgaacggcagcgccggctcctccctgggtctcgaacctgcccagcctgcagattttggacttgctagccttcaggatcacattagccaattccttaaactcaacctctttctctgtatgtaggatatggacacctcctgctggctctttttccggagagcccagtgaacacaccgtgcatcaggctccatcattcaccagagcgtctttccaacagactttgctgtgatatttcttaaataaaggtcactccaaagaccctcacctctggattgtaaccaactcagtggcagacttaatccatttctatctgctgacatttctcacatggaataggctgtttgacagattgaagctgtctccccccactccccaggccagtgcacacttatctcccttgaatgttcattttgtgctcattttagagactgaggcacaaagacaggcaaatacaaggtgaagtcagtgacaaataaacaatgctatttaggcattgagagtttgtttttgtgtttgtgtttttttgctaattaattccacctggtagaggagggcgaggggaaagaggaagggagaagtttcctggcagggctgagaggcagaatggtgcctgcacctcctggagtgcacggcaatggtctggctctgctgccttctatgggtaagggcccaccggttttttttctgggacttaagtcacctgggcttatactgagcagccctcagcaagctcttctcacttgcccctgccacccagagctccaggatgccctagttcctgcccctcaaagacctgggactcctgctcctgggaccttctggtcggttctgcttttccttgcttcaggaccttacgtggattctgtcacctgccacctcagaactctgagcgacacacccactgcatgtcacccaggacaggttcacccaagtctttcatcccaagaaggtccttcctggcaccttgtgggctgacagcatctccagggaaccacaggacttcgagggggcctgggaagcatcaagagcttcaggaggggagtctgtcacaggtggggattacggagccctgcagggacccttagaacaggtgggtcggggtggggctgaggtctcgacgccttgattcaggttcctggcttatgtcgacctgtctgaaatctcccacccacagccaagccactggccaccccactgctgccctgtgtcaccctgttttgatggagagctcaccaggctctcccagctgctctcctcttggagcagggagtgttggaagtggggggctgatctgcatatgaacgtggctcttaaccaggtgaggggcttgaagtcctctggggctaatgactgttccatgaataatggtccctcttaaaatgtaattaaacatttatcagatgtatttctacagaaacatccatcttaaggggggaccggatttcctaccattcatatcagtctcctgaaatgaggcagaggcactcccggctccccctcccctccccggcctcagttccctgggccggatgtcctgctggggcctgtggtgcagtttcggctggttcaccccatgcagagcttgatggggttgggttggttttaatcagaatggtaaattgcaaatgatacagggcctgggctctgttgggatacttgtgttgaccaagtcccttgtgaattaaatcatttaatactggaaatggaaaaggccccctcattttccttctgaatgagctgtgaaataggctctgagaacggcctccagagtgaagtggttgtcagggcttggcaccaagatctgatgaggggtcagaagacagggcaccagcaggacagggtacttggggaggcctatcatgatgcgcagtagacgcatcctgtgtcggcagcaccccaaactcgggaggctggccggggtgcagctaacatacctgggatgtgtgcactgactgcatgccacctgaggcaccctcggagcatctgagaaccaaagaatcactcctcagcttcccaaccaggggacaagtttgggctctggcatgggacagctcttgtctgcactccgaatctctgacctttctcaatgcagtgctggggttgacttggcagatgaggctgctgggactcaaatcacctcactggcttgaagtcgtatttaatctgctcccaagaaggtggagccaaggactagctggtcccagccatgaattctctgaaaattagaagaataacaaagcatatcaaataggattaacacaaacacttttcaacacagtgcctgtgaggcaacagaaacatgagcacaggatgcccatcagtggggggccaccagggcccaatgtctccaaaagcaacttgctggatgtatcaagagcttaaatttaaaaagcacttaatccctgatgcagttatcacacacataagatattatcttaaggagctgtttataaatgcaaaccaagattatgtagtaatatgatcattgccacataaactgcaacagcaaaagttggaagcagtacaaatgtccagcaacataggaatggagaagagtgcacgggttttccagacagggaaatattgaaggatgatttgatcatatgcttgcctgaaattttcaatagtgtggaaagtgctcgtgatttcatgtgaagtgaaaaaaatggatacaaaaacgtggattttacacttttatcacacacacacccatattcagaggaaatagttaaataagagacagagcaaggtaccaacagtagtaacatgtcagtggtaacattatagatggttttcattttctttttcatagttgttggtatgtttcaaaaatgatcaggtctttgaaaatcagaaggaaaatcagaagcaagagcaccaattgctaccaggtgaaaaccacaatattctctagcaatttctgcaaactataggatccttcataaaatatacaggtcctttaataattgatatgttcaatttttcaataaaaattctgatgtaaaataaggaaagaaacattcaaagtattcattttgatcttgtactcatgtttgagaaagatacagagcagtcaaattactttggaaagtgtaaaaattggtggtttcattttaaattgctacctctaacaccttcatgtgacttcagtaacctatctgctccctgacaaccttaaagtgcttaattaccacaaatttctgaaataaatctatcatttgaataacctttgtgaaaatcagtattgagtgcttttacatgatttgatcacagcaatagaaacagtcccatttgtctctgcacatgcaaatgacttattaacattcaagtgatgagttcactttactgagattcccaagatatgcataatccccaaacattactaccctccctaaagtcctttaatatcatccctttgctctaggacgccctgattcctcaccagcttacattcccagcagcatctggccgtcttgccctctctgctacccctggccttatcacagttcctcaaactgaacaggctcagcccaacccagcaccttggcacttgctgtgcttcgcagagctcccatccagttcttgccccactcagctccaccctgtgggatgttccttagttccaagaaggcacggcatcctcctcacccccagtcctttgcacacgctgttccctttgctaaaacattcttcccctcccaccacctgcagttacctggctaattcctgcttccctttgatagactttccctccattctcaaaccctatgccccaagctcctgtccccgacccaggatcaaactctataatcccccaaatgtttcctttgcagcattttgcacattcagttactggatggtattttcattgagtctttgaatagttggcttcccgtctggtctggaaactccatgagggcagagaatgaaagtcatgcactcaccccagcaggttgcctgttaacaaagattaattgaatgactggtagatttgcacagcatttaggcttttgtgccctgtgctggaatcattctgtgcttgtatattaagccactttacctgagtggaatttcctttgtcatactacctgcaggtttagtgaaatgacagtccctgtggaggacagagaagcctccagctgcctccctatgctgggatgggaatgggggaacaagactagatggatccatgaaggaatgaaacacaccacacaagagcaccagtatctgttcacctgctacacatcagtcattaatggcatccaaaaggaaaagaccctttctcctgtatgacatccatccctgtacctgtcccagccctggaaccaccagaaggaacagcggagaaggggaccccaagccttagttagaagtgagtagggggagaggaaaagcttggaattaaatgtgagattaaaatttagatttggaccagcctaggcttttactacctggatgagagtgagaatgattgatgagcttgttcttataaatagaagtgggccaggtgtggtgggtcacgcctgtaatcccagcactttgggaggctgaggcaggcggatcacaaggtcaggagatcgagaccatcctggctaacacagtgaaaccccgtctctactaaaaaaaatacaaaaaaaattagccgggcatggtggcgggtgcctgtagtcccagctactcgggaggctgaggcaggagaatggcataaacccaggaggtggagcttgcagtgagccgagatcgcgccactgcactccagcctgggcgacagagcgagactctgtcacgaaaaaaaaaaaaaaaaaaaaaaaagtgaacaaaagcccaagggatcttcccaaaatgtcatccagaagcaggggcctgagacctaataatagggcaaggattaggatgaggcaagggagacactcaccccaggcataaaatctaaatgggtaccaaaaaattcaataatcatcataaataacatcataacacagtactttttaaaactcaaacttcatgcaaaaaaaccgattaacaaaatattaaaaatttaaagacaggatcctttgtgaggaaggaggaggaggaggaagaagaaagacggaggaagaggaggaggagcagggggaaggaggaggagggggatgaggaggaaaggagacaggattcaaggcagcacttgcacaatttggcctcacttgctcaccctaacccagccctgcctcacagaagctactggaaggcagctgctggagaaaagtgaagccgtttcccacttgtatttagttcagaccttccgtaaaccagctacaggagagacagtgatgacccacctgtgccaaacagggctgaaatctaccatcaggaccacgataaccgggtctgtgttgcccgttcccagctgcgctcagacactttgacttaaagcctcaggccagggttgcttctctcattgacattgagaacttgttaagagaagtaagtctcagttataggaagtcagatcttcccaagggatgcaatcaaggagtttatttatttaaaatgcagctccgtgtaggggtaggaaagggaatgattcttttttttttttttttttttgagacagagtctcgctctgtcacccaggctggagtgcagtggtgtgagctccgctcactgcaagctccgcctcccaggttcacgccattctcctgcctcagcctcccgagtagctgggactacaggcacctgccaccacgcccggctagtagagacggggtttcactgtgttagccaggatggtctcaacctcctgacctcgtgatccacccaccttggtctcccaaagtgagctaccgcgcccggccaggaagggaaattattcttattcttgttttcatcttgattcattttctctgttgtgtcatctctggccatgagcctgtcacttctgtaataaaagagcagcagtcaatagggttctatttggaggggaaagtacaggctgcccatcaacatgctcaggtttctcccagatcagccccaaggagcaagaacggccagcttacaaggacaggtctgtattctgtggatgggccagaaagagggtatgcagcgagggaatggtaataacgtaggagaaaatggccagggtcacagcctggtttgtccccttctcactgggggcctgcagaaggctggtccaagccagcgacatccgtgcataggggtcaaaatggactgggacccttcatttgcttcctggtgtcttgagatagcctcccacccaccagccccactgtgggtccctgcactggcttcaccaagaagaaactgggaggctgaggggctgacctgcggggagatcttttactcagtccctgtggacctgttgaatgtttaacttatccttaaaaaacatgcctgcctctttgcatgtctaactgtcataaggaacatgtgctactttgctaaagaaggaaaacatcactccagaccacctgtgcatttagtaaacaacaattcgcagcccagagcagtgggtttgctgctgctgcagaaaacaaaagctcaaaacccaggtggagccttcaaaggccacctggctccaaattcaccctcggaattcactaactggtgtgtctggagctgtttcttttttggtgtctggtgtcaggaaagagaagacacagggacaccagttggcggcttaatcacatcagacccaaacctcagttctgtgtgtcccatctagacgccactggggctgaatgaaccacgagctgctgccctgagcagggagtcgaatccatccttgatcagatggctgaagtcgcgcacaccctctagggccctgcatgggggtggggaatcacccgttggttttatctcacagcagggatgacccctcactgggcaccccagctcagacctcaagggaaacaggcctgaggaaagatgggtggaaggatggggcccctggtgggaggactcacagggtaagagaccccacccacttaggcaattcacactcggggtctttggggccctcgaaggaaaccgttggttcacagtgaacacagacaggtccagctattcaggatcacaattatctgcagcagggacaaccacccactgccaaaagatgaattcagtaaggcagaaactttagctcatgatgaatttcttactgaaaatgatttctataatcatgttttatttacctgtatttaaagattaaagtttcaatatggcaccttaattccttaacaaagagaaagaatgcatatcttgtggtaacggggaccagcagctccatgaatcaaagctttctgtggctcgatctagttcagggtatgagtgatacatttaatgtgccagcaaaagcctctggtaaacagggagcagcgttacagccagcagagcccaagggcttgccggagctgatggagatttaagggagcaggttcgagctcctcctgaggcagaatgagcggaaggctctctccgtctcctgagtgtcaggctggactcaaaagggagagaaaattgtttaaatgaaacaaaacactgtcattgcaatgtgacattctcttcccttttttttccttttttttttttttttttggacacaggttcttgttctgtcacccacccaggctggattacaggggcatgatcttgactcactgcagcctcaaccttccaggctcagatgatcctcctgcctcctcagtagctgggaccacaggcatgtgccaccacatctggcttttttttttttttaagacatgaagtctcgccacattgcccaggctggtggattacaggtgtcagccaccacacctggctcccttccctatctcacctgacagtgtctctacatccccatctcttaccactctcccaatttcttagatactctgtccccatctctgatcctcctgatctctggcctttgcacttgctgttccttccacctagtgtgctgttccctcaaatcacccatggcagccccttcttatccttcaggactcagcccacatgtcacctcctcagagaggccttcccagaccacccaaaatgagacagtagctccacccccatgactctttatcccatctcccaatctgtgtcctttattgtatctttcacagtctgaatgatgtttatgtgttgacctgcatgctgtccatcctcatagactggaacttcctgagagtgtcatgagatcagatggctcttacggctcttactcaccgctgtgtcccagacaccagcacagcagcctgtgtttaaagatggtctgtcaatatttgttaagtgactggacagatacggaagtggacagttacactgacagtttttacagggggacgtgttgctttgtcttcgacttgttccattgttctcgtatataacgtgggcctgaccagaaggaggtgctgcttggacatgacaaaaaactttcacacaatctgttggacaataaaccacataagtaccccttctctatccattattctacacctttgtggatacatcaatagatttcatgtgggctcaggaattttgaaatatatattttaacaaattgctcatatagacagggatcctaaaatatagacagacatatagatagtcacctgagccctgcacactctacgcatgactttgcaatccatcctttgaggaagtctgcagcaaagacggcccttcagagctgtgatgaatcgagtcaaggggctggacctttagacccctgtgtttactactagtctttggagatggagggaccccaggaagggtgactgggcaaagcagctcctgtcagccaggggcattttctggggagggtctcagctgtgagctctcagcaggcaaccccctgggcagtggggcatgcatgcctgctcctgaaaggggatgtgggggacacatcccagcatctgctccaagccatgaatctttctcaccaaggccattgtgcaaaagcttcctgacaggcctcccttcttccactcttgctttccctattttccacacagcagccagaggaagcctgtgaaacccaggtcaggtcctgtgcttcctctgctcagaactctccatggtttccacatactcagagtaaaaccccgagcttcatgataaccatgaggcccgcagcttctgcccccaaggcttctctgacctcacctcccgctgctcctctcctcactcggccgcagctgtggctccctccctgattttcctggaacatgccagcacacctgttgctggctttgtactcactattcttttgcctggaaggctccacccttgtcatcctggcccacagcctcagctcctccggtctttgctcaaatggtggcttctcagcggggtcttccctgaccatcctactgaaaatcaacaaccaccccccatagggggttgaacaagggccccccatacatgtctacattcaaacccctgggacctgtgtatatgtccattgcaaagaggttttgctgatgtaattaagtaaaggatcttgagatagaaagatgactctagatgacctggctgggcccagtgtaatcacaggggtccttataagagggaggcaggagagtctgagtcagaggagctatagtgacagggcagagactggaatcatgtgcttgaatatggaggaaggggccgcgagcccaggaatacaaggggcttaaaggaaaacacaggccagaccagcactttgggaggcagaggcaggtggatcacttgaggtcaggagttcgagaccagccaggccaacatggtgaaataccatctctactaacacaaaaaaaattagccggacatggtgcacacacatgtagtcccagctacttgggaagttgaggcagaagaatatcttgaacccaggaggcagaggctgcagtgagccaagattggaccactgcactgcagcctgggcaatagagtgagattctgcctctaaaaaaaagaaagagacaaagaaagatggcagggcggggtgttggggagagagagagagagagagaaaagaaggaaggaaggaaggaaggaaggacaggaggaagggaaaggaaaggagaggagaggagaaagaaggaaagaaagaaagaaagaaagaaagaaagaaagaaagaaagaaagaaagaaagaaagaaagaaagaaagaaagaaagagaaaaaagaaagaaagaaagaaagaaatagaaagaaagaaaatacagacactgaaaacgcaaagaatcctgccctcagcgcttctagcaggagccagccctactgacgccttgacttagcccagtaaaaccgacggcagactcctgacctccagagctaggacagagtccatctgtgctgtttgaagctatcaagttggtggtgatttgtcacagcaaccacaggaagctaacacaccctcccacatacctggagcttcctatccccaagcctgctgaatgtctccctgtagcatggattagcagctgacatgtgtacctttcactgatttgtttctccttctccacttactgaatgtctgcttcataaaagcaggaattttgtttgttgcaagatcccctgcacctagcacagtgcctggcagatagcaagtgctcagcaaacatcctctgcaatgctgtacctgagtcctgaggagggaggaggagcagatactgggatgagccaggggacagagctcccggcagaggcagaagcaagggtagagtctgagtcacaaccaatcccatccttctagatggctgctgtaggacccatggataaacttcctcctagccctgcctccacagagaagtcccttcaactgaagccatggaagctggaaactcacttaagagcccctacagtgagagattaagagcataggccctgaagccaggctgcctaggttcaaatctcagctctgccactcagtagctgagtgactctgggctagttaattaacctctctgtgctaatttccacatctacagaataaggataatgatagtgcccatctcatagggctattgtgaggattgaaatagctaatgcatttagcacagtgcctgacacacagtacacatgatctgctcttcctatttgggtggaaaagtccagcaagttgcaaagattgctaaaaagcaatgagagtataccaaggtgtctaaactgacaagcaaagggtatgattaaaagacaagccaggttggcagcagaacatcagctttctttgtgcctgggccatagacaaggaattgaaaggtagcctggcaacgattcgagaaaaattaatcacccctgctgccttcctgcccctgcccatcccatttaacctgcactctcccgccccctgccctatccctaaagggatcctggagcctcctgttgcacaggccgggctgtgacattcacaacacaccccagctgggcccagcgagttgttttccagccccatctgcccagacacagccccgtgaagagagggccaaatgcacagccagggctgtgttgactgcagaagggatagaagaaaatagatggggtggggtctgcacagtgagggttggtgcatcatgtgggtctcacatgtagcttccctccaacaagccccctgcaatccccaccagatgtaaggagggaggggtgaaagtggggtttccgccagaggtagcagagctggggaggggcccaggctgcagggacctgtgtacagggcatgagatgtcattggggacttcctacatgagacgcagtgagtcatcagggtgcagggtggaggctctgaaggaagagcccaggggaatatgggaaagaggtgacatgagaatccattagccaccaccccagtccttcacatgagaactcatcagccaccaccccaatccttccctcctctgttcaggagcagggccggggcccaggagacagggtgagctttctgcaggagggacacccgccctgagaggaacctgggctgtcatagccgcacagacactgcaagccaggagcagtggccacacccgtggagcagaggaatcagaagggggcagaaacagaggcttgtcacctgagggctgtgagcatgtgtttgccgtgaccaaggggagacaaagcaagtgacagagatgccttctcgtctgcggggattccctctgcaggtctccagggacagtgggtctgaggggcaggaacggtgggggggctatcacaggtgccgcatcaggatgtccccttctgccctgagcagcgggcagtcccctcgaagatgccacgtcatcagcctctggcccgagggcttcccagagcctccctttctccgttttgggtgacttgggcaggcactggcgtctacatctgtgtactcttggcccctagtgggtgtgacctgggccctcccatcagacacacttcaatctcatcccacacagcccagggccaggccttggcacctcatgcacagactcagacaacgcacctgcgatccgggcgctgagactctgcacgtggcctcatcccagtgtctcagagggaaatgaggcttgaatttctcctggcacactggacaccccgcatctcacggtgctgcataagaggatgcttggccctgcatcctccctacaataaccatcatttaataaggccagaagtggagaaggcgaggctgatggggccgccatgtgttcaaaagcagcccccacccacgcacaagcagccctcagaggcgtccaggcagctccaaccagcagataacaggcaccagaatgtgcagagccagcccagatcacagcctggatctcaatttgcaagaaagaacttgccaggttgagcagctgccacgagtccggatggcttggcattttctcctggaggctgttctgagagccagaccgggggtgggggccccttggccactatgggtccctgcagtctgcaccgagcttggagtcaccaggctgatttcatggatgtttatggagcctgcaggagaccatagcttagtgtgtcccctgctaattaaaggacagcagccagttgttccctgtcagagattacaaaggatgaatgctttggacccagggagcggatgggagcatatcagatgccaaaacctggtgcctgccacctggcattctttggaagtgactctttgaggagcactgaccattatcggggagatgggtattggggagcctccctctcagctctgggggctcaactctgcccacatagggcaggaggacgatgtcctgaagctgtgcctgtccttgcccaaggagggttgggggctttgcaggggggtatgtgaatgcctgcaggcctggggatcaggggacctgtgcagggctggaagaggggttctcagccacaggacagccctgcttcagccagtgaagccatgtgtggaaatacagctcagcattgctcaaccttccagcagccaggacaccctgggtttgagtccctgctacggataaaagaaccgaatccgaccatttgtcttcagccattctcagcctctgcctctctccccagcccctccacccgccatgttcaaggaaggcagagcccagaacctgttgtgtggggccttgggctttccacggcctgatcagtgctagtctctggggagcactttgggggacacattcagattctctcgaatgcctcatacccggactgcaatcccccattccaccagtgatttcagtaccgtgtgggaaatttcatcaaatttgcaagtgtgttgtttctccttttacccccattctatctgtgagatgctctagaattcaccagatgtaatatatctttgggatgaatattctatgttaagtcctttgaaagcaatcaacaactgtaatccaattactattggctgtatctttcatgctcttttgccccaaacctcatcctacctgtgtgccaagctcaccacatacacacacagacacacacatactccacaagagatgccaattttgtgcctcgctgcctcacataacatgggagcattgagtagtgaacagctgatctgcatgaattaacgtgtgaggtcatgtgggccctgaagctttcacactcacaaaccggcgtcaggctgggctgtcatagagatcaggtggagggacactagggttccccccaggactccaggcctcctctgatgagcaggtcacatggggatttagagggaggcacaggcacgaactgcgtattaaatacacctgactcactgtgtctgtgagtgtgtgggcgtgtgtgggtgtgggagagtgcatgtaggagtgagcatgtgtgtgagtgtacatataagtgtgtctatgtgtgtgcatatgagtgtgtctgtgtgtgtatgtacgagtgtacatatgtgcgtgggcatgtgtttgtacacatgtgcatgtgtgtatatgtatgatgagcaaatggatgcatgagtgtgtgtgggcatgtgtatctgtgtgtgtatatgtgtaagcatgttagtttgcatgcacaggtgtccaggtcccacatgggatgaaaattgaatagctctaaagatctactggacacatttcagatcctaacagagctcttaagcttgaaagggtcactgaatgcacaatgagtgtttctgagtccaggtggcactgactcagcaatgcaggaaagcagctcctggagttccaggaatgacccccactttctctccctcccagtcacagacccctccccacgtcccttcctctccctctgtttgccttctgtgcctctccctttcccagtctcatttcttgcatgttcatcacttcttcgtcctgcagttcaattcccctccacccctcagcatggactgtgggatgagagagccacagccttatccctgacgtaaccaaaactcttggcaccagcttagacctgtttctcagtcttataaacggtctcaaatcagggaaatgtaaggttctgaggaaaatgatcacaactaggtgattcccctctgtgttaccgtaaggcggtgagacagagattctctaatgtttttagtgcaacccaccgtaagaaacccattgcaaactgccacccagcacacacacgcacatccatttatacagaaacgcagcacgtttccccaaacggcactcaccctcgctgcacacaacgcactctgatgcctcctgacctagtctattctggtctattgcagattttcaatgccgggcttgacactctaaattgatttcaagacccactaatgcatcacagcctgtgacttgataaactccacgctaagacacatcccgttgtgaggtgttcgacccaaaggccatttatcctgcagtgagcagggggacaggattcaccctgaggcgcgcctcctccttctcagtcaggcagggaggagggggctctgtgccatgggacctgcagaggtcctggtctcagggttagtgccctgtggctgctgtgtgtccagcagctggcagggcaggaagattgggggtgggggtgtcactcccacaggcacacagcacccggcagaaccctggcctgaagctgcttaggcctgtggcctcttgagcccacctgggagcaggccctgggggacagctgttgggggcagggactcccaatgcacggaacaggccatgagctgggcaagctgctccttcccataacctcagacccttcttctcacccacctaggaccagctcctgggagcttgcggacaatcctgggcccagagaagcaggcagatgcggctgttggtagcactaatatgggttgtgaatatcatcctgtggttattactttacttaagttacacgccagtacactcgatcctgcacgtgtcccctcacttcacgctcatggggtttgcacgatgggaggagcgctcccagcaggtgatgagggtgataaatggcactggacattcctggagcacctgttggcacccagggcggggcttagtgctccatttgagtctggagtctttactctgccatagcagctgtgtgacccccggtaagcggtttaacctttctgtgcctcttctttctcaactctaaaggtggataataaagtccctgccctcaagcaatcaaaggtgtgttagaagggcttggcacatggcaggcagacagtatacatggttgggattaaccccactatacagatgaggaaactgaggctcagaggcactggcctggcaggcagtgggacctgcacccaggctcgtctgacactgagctctttggcctccctcctttactgctgccttcagaagagacagaggagagggccaccccctcacacgcacacaggggctgaccatccaaggaccccaatcacctggctgcgagcagccctgctcccacggggacactgaccgctccgagtgcccggcattcaggcctcgagccacccactctgcactgcacggggcctccttggaacgcgtccctccccaggggccgtttctctgtgggatggcgctgctctgtggggaggaccccacctccctccttcatgacgacctgcccttacctggctcgtctcttggcagacgctgtcccacgcatctctgtcatttgcatgccaccgtggtgacagtcttcctggccacgggtgtgacagggccttttagtttctgactgacacagtcacagccccatttcacctgattccacttacaaaggcaggtttcccttcccagcctcacatggaggtggtctccgtggagttcaagaggatgtgggctgggaggaggggcagcaaagaaccccagcccaccccaagcaggaggtggcagagtccatccggccgtctggagatagccgagacccttggccactgcagttccccccactgagcctgcccccatccccactccacactggaacagatgctggaggggcaaaccccaaataccctccctaaccagaaaccaaactaccgaaatccaccagatcccagcccaccgtggccagatagtctgactttccaacgaagtcgaaaatacagatttttagaattaaaatgcaaatgttggcaactagttcaaattaatttttttttttcatggaggctttctggtgaaaacctgaccccacctgggagcaggccccggggggaaaagctgtgggagataggaacccccccaccaagtgcaaagaacaggccacgagctgggcacagatgcctcttccccagcctacctgggagtgacaaccggaaaacgtgctagacaaattctgaaagagctgtaacaccttacattattttaaaagtccccaggttgagttaatcccagaccctttacagctttttccttctgattggtgaggcctcagctcaaatgtcacctcctcagagaagccctcccccttggccctatttaagtagcccccaccagagcctcagtcagcgacacgcacccttcatttccttcttggcgctgacccctacctgcaagtgcctcgtcatttgcggttggcatctgcactgtccgtctccaccagcacttaggctccgtgaggacagacgcacgtcgccttgtgccctggtgaatcccaaatccctgccctgagcgcagtgcctggcacagaacagacacaggcaatgagtgctgctgaaagttccccatggagccagtggtgatctgtccaggctctacagccctcccgctaaacgtgttcagagacggggacgctggggccatcctccttgctccactcctggtgaagagccctcagacccataagatgggcttgtccatatcaccttctcaggtgagcctcatacataagcaggttcagtgggttaaccaagcctacatctttaacccacgtgataaccacagtaccaggtttctgccatcaaatcttttctatcctcagtcctgccttgggaattcagactcacccagaattcagagtttcacagactcagaagagaatgtgatgctagattgttctgaaatgtttggttttaaagcaagatcaaatgattacatttgtgatctgaaatcatttgattgtatcaagccatatccccttccaaattattttctttaaattctccccagaacggggaacagtattaattgtttccaatgaaaagactgcccctttcatcaaagccatgagctttatctgctgtttttgaatataacgctgacttagtaaaagtgattgtaaatagcaggtcttctttgtgcattttgtgcttccaaatgtgctagttggaataaagaagtgaaaagtttaaaaatcctctcttgtaaatgtttggaaattgcactagagttatttcttgctctttgaggggagaggtcaccctgcaaatgtacagtcacacctgttcggctcccccgggttttgaatgtcactaaacccccacttccccccaccttggcagatcagactctgtgaaggacgctcactgtctgtgcgacctcacaccaggtacagggaccaggggaaagaggcaagtctggcttgtgggacagtcctgcaaggccacttttctggtagggaggtgacacctgcaaaggaacctctcatttctcccagctccagccagtttcaacaacaggtggggttttctttcctctcaattattatagatttcttttctaataatcaaagtcatgattcattttgaaagtttttaaaaatagaagaaaacaagattttaaatcacgcgtgattgattccaacaccaaagataagcagtattcgcattttgctatggagtgctcctgttagacatacacacacatatgatcacacttacacacttatgcatttttgcttcattaaaatagaataaagctttatgggccaggtgcagtggttcatgcctgtaatcacagcattttggcagccaagacaggcggatcactgaaggtcaggagtttgagaccagcttggacaacatggtgaaaccccagctctactaaaaatacaaaaaatagctggatgtggtgcatgtgcctgtaatctcagctactcggaaggctgaggcaggagaattgtttgaacccaggaggcggagggtgcagtgagccgagatctcaccattgcactccagcctgcataacagagtgagactctgtctcaaaaaaaaaaaaaaaagaagagctttgtttacactaaacaatattttgtgtccatatttacacatagataacaacagatcactatcatttttggtatgggcatatgtagatataagtattacatgaatttcctactttttatccagttatggttatatcacctatcagtgatttaacttcagccaagacagaagtttatctcataataaccaagactgggccgggcacagaggctcacgcctgtaatcccagcactttgcgaggctgaggtgagtgtttcacttgaggtcatgagttcgacactagcctgctcaacgtggtgaaaccctgtctctactaaaaatttaaaaaattagctgaatatggtggcacgcacctgtaatcccagctattcgggaggctgaggcatgagaatcacttgaatccaggaagcggaagttgcagtgagctgagatcacgccattgcattccagcctgggcaacaggacaagactctgtctcaaaaaataaaaaagtaaaaacaaaactggaggttgtcagtctagggtggcgttagggactttcatttccttccagaggacattctgctatccacagggtagaagcctaatcctcaaggttcaaggtgacaagaatagctccaaccatcatacgcttattccaggaagcaggtcaaaggatggaacaactaagaaatgacattaaagatatgtgtcagtccatctgcgttgctataaaggaatacctgaggctggttatttatagaagagaggtttaattggctcacagttctgcaggctgtacaagcatggcaccagcatctgctcctggggaggcctcaggaagcttccaatcatggcagaaggtgaaagggaagcaggtacatcacatggtgagagaaagagcaagagagggaggaggatgtgccaacccctttaaacaaccagatctcccataaactcagagcaagaattcagtcattgccatcgggacggcaccaagccattgtcaaagggatctgcccacatcaccaaaacacctcccaccaggccccacctccaacatcagggatcacatttcaacatgagatttggaggggaccaacatccaaaccataacaagacagaagttatagaaaggggtctccaaaaataccacccaacacttttattgcctcccattggccagaacctggtcacatggccacaactcactgcaaggaagcctgggaaaatgtagcctgtgcccacccaccaggagaggggagcacttttgccagggtgcgggaccaccagcgggcatttatgcttcctacttctttcttcttataaaaatccttgagattcatctttgcatgtttttctgactatttcctagggatcaatgcctataaatgaaatttgggaccaaaagttacgcactttcattggccagttgcaaaattgccctctagaaaagttgtaccaacgaactcacccaagaggtggggttctatttcatgaaatgtttctccaccccacatttccttttaatccacaccctttggcctttattaggcttagacatctcttcagaatccctgcttcctacaacataatcttgggatttaatacatgtttttcattcaggttattattaatatcagatttatctaactatgcgtgaacccagccacagccttagggaaagagatgtatctttcagtgctgaagagaataaaaattaataatcatcagagactttgaaactgaagtgggcagggcagggtggaaagaacagatctcattctacgaagtgcatggagggatattcacagagcatgtagtgctgagtacagcggcccaggcacctggggacacccagagagcagcctttcctcaacagaaaaggagtgagcaccacagagagctgcagaaagggaatcccagacaggggtaacagtagatgcaaaggccccatggcaggcaccaactcatacaggtttgcccagaactttcccagttttaacactagaaatcccatgtcctagaaaacttctgagtctcagccaagctgggatgatttgcctggaactgcccctgttataaaactgagaggtctgtgccccacgacccccctcagtcctgagcaagctgagacagtggattgccctagactggagcaacgtgcatgacggtgggaagagccagtgactctctttcatgtcctctctcccctcaacctcaggagtcacccaggtgggcactgacatccaggatgaaaacttcccagcatcccttgcagcaagcagtggccacgtgaccaggcagtggccaatgcacatgaggccagtgcacagcaactgccattagaggaaggaagatttgtgtcctcttgttctcttctcccctccctgctggctggcagtagataggatggacactgtgggggaagctacaccctaaggaagtcaaagcagcaagatggaagtaccctaagaccctgaaaaatgcacagagaagaatcacctgactggcttgaactttcatgtgaaaggaatgaacctctgtcttagtaaagccaccgtgattcagggtccttgtcacattcactgaggctgtaacataattgttagaaagaacaggagcgggaggggggatggagtcggagaggcaggcagaggtcagatcacatggggcctgtaggccaaggcggaggaagaaacaggcaacataggactcaaggaccacacctgctcccaggcaaagggagtttgctgtgggtgcccctccctgtctgtgtgtccagtgtgtggctattatttataccttgcccatattgtacaaatacttttttctattcaatatttagaagacattacattaaatagcaagatggcagatgaacatcaggaaggaacattaggaacatccacagtgttccatccaggaaccttcaccgtggaaacccttgtgctcatgggcgtggtctcaagacacagtcagctgttggggatcagaggccacactcatcgtagcagagaggcaggaccaactgggagagggtccttctgtgacacctactgcatcaccgggctgtgtgaagtgactcagctgccagaactcacacaatatcattctacaccaaaacctcatgggaaaaatggtaagttctcagtttctccattaatagcaactctcagattaatctctcctccatcacttctccatggaacaactttttatagctttccttgggtctatttttccatttattttttgttttactaactgatggaaagatatatattgtatgtgtgtgattttgtctctgtcagccaggataatcatagtttaattcttattatttttattaccaacatcctttcgtttttttaagcttttcaattcctaagggtattaatcaagatctttctgtctcatgagacacagaaaacaaatccaaactgtgtaagaggaaaaagaatgcactcatcactagcattgagaagttcccaagtttagcttgcttggggtacagctacatctaccatttccagggtcatcctgtaactctctctacttccccaactttggctccatgtttagctccacgaccctcaggcttaaacagcagtactggcccctccccagatctccagctccctgaccctcaaactccaactgcagcaccagctccgccccgggtctccagctccacaatcctcaaactacaacagcagcaccagctcccctgtggatctccagctcaatgactctcagacttgggaggcggcaccggctccccaccaagcctccagctccacaaccttcaaactagaacagcagcaccggctaccccctgggtctccagctccctcaaaattcaactatagcactggctcttccccgagccaccagctccacaaccctcaacttacacagtggtagcaccagctcctccctaggtctccagctacacgaccgtcaaacttgaactgcaacaccagctcctcttcggcctccagctccacaatcctccaacaacaacagcaacaccggctcctccctgaatctccagcgcaacaaccctcagacttgagaggtagcaccgacaccttccccaaggctccagctccatgaccctcagatttgaacagcggtagcaccagctcctgtccaggtctccagcttcatgatccttaaactagaacagcagcactgccgcctccctgggtttccagctccatgaccctaagacatgaatgaaagaactgggtcaccccagggctccaactccaagacccacagatttgaacggcagcaccggctcttcctgggatctgcagctccacagccttcaaactagatcagcagcaccggctcctccctgggtctccagctacacaatcctcagacatgaacaatagcaccggctcctccctgggtctccagcttcactaccctcagactagaacagcaacactggttcctccctgggtctccagctctacaatcctcagacataaacagcagcaccaccggctcctacccttgtctccacttccacgaccctcaaactacaacagcagtaccggcctctccccaggtctccacatccatgaccctcaaaatagaatggcatcatcggatccctcctgggtctccagctcccaaaccctcaaacttcaattgacacaccggatcctccccacagttaaacagcagcacaggctgttcccaaaagctccagatccatgatcctctgacttaaatggcggtagcaccggctcctccccaggtctccagttccacaaccctcaaactacacagcagcaccggctcctccccaggtccacagctccaccaccctcatactagacaccaagactacctcctccctgctctccagctacacgaccctcagtcttgaacagcagcagctcctctctgtacctcaagccccacgaccctcagacttgaacaagaacaacaccatctccccccagggctccagctcggggacctacagatttaaacagcagcaccggctcttcctgtgatctccagctccactaacctcaaactagaatagcagcaccggctcctctttgggtctccagcttcactactgtcaggctggaacagcaacaccggttcctccctgggtctccagctcaacgactctcagatttgaaaggcagcaccggctcctcacaaagtttctggctccaaggccctcaaactagaatagcagcagctgctgcatcttgggtctccagctccacaaccctcaaagtagaaaagcagccctggctcctccctgcctctccagctcctcaagtctgagtgttgtagagctggagacgcagggaggagtcagtgctgctgttctagtttgagggtcgtggatctggagacccagggtggagccggtgctgctgttctagtttgagggtcatggagctggaagaccccgggaggagctgctgctgctgttctagtgtgagggtcatggagctggagacccgggaaggagtcatttgaacagcagcactggcccctccccaggtctcaggctccacgaccctcagacttaaaaagccgtagtacgggcttctccctgggtctccagctctacaaccctcagacatgaacagcagcaccggctcctccccctgtctcccgttccatgaccctcaaactacaacagcagtaccagcctctacccaggtctccagatccacgaccctcaaaatagaatggcatcaccagctcctccctgggtctccagctcccaaaccctcaaacttcaactgacacagcagatcctccccacagttaaacagcagcatgggctgttccccaaaactccagatccctctgacttaaatggcggtagcaccagctcctccccaggtctccagttccatgaccctcaaactacaacagcaacacaggctcctccctgaatctccagctcaacaactctcagacttgagaggcagcaccggcaactccccaaggctccagctccaccaccctcagatttgaacaaccgtagcacgacctcctgaccaggtctccagcttcatgatccttaaactagaacagcagcaccgctgcctccctgggtttccagctccacgaccttaagacacgaatggcagaactggctccccaccagggttccagcttcgggacctatagatttaaatgacagcaccggctcttcccaggatctccagctccactcccctcaaactagaacagcagcatcagctcctccctggctctccagctcccaaaccctcaaacttcaactgacacacaggatcctccccacagttaaacagcagcatgggctgttccccaaaactccagatccacaaccttctgacttaaatggcggtagcactggttcctccctagatctccagttccatgatcctcaaattacacagcagcactggctcctccacaggtctccagctccaccaccatcacactagacaccaagactacctctgcccctctctccagctacacgaccctcagacttgaacaccagcagcagctccttcctgtacctcaagccccatgacctcggatttgaacaacaacaacaccagctcctgcctagggctccagctgcagaacccacagatgtaaacgatggcaccggctcttcccaggatctccagcgccactaccctcaaactaaaacagcagcaccagctcctttctggttctccagttccataacactcaggcatgaacagcagcacccactcctccttccggctcaagattcactaccctcagactagtacagcaaaaccggttcctccctggatctccagctaaatgactctcagactggaaaggcagcaccagctcctccgtggatctccggctccacgacactcaaaacaacacggctcctccctgggtctgtacctccatgaccctcaaactacaacaacactgctcctccctggctctgcagctccaccaccctcaaactagaacaagacttctcctccccagggtgccagctaccgaaccctcaaattacaacaacattgctcctccctgggtctgtagctccaggaccctcagaccagaacaagacctctcctccctgagtctccagcttccggacccttgaattacaacaacattgctcctgcctgggtctgcatctccacaaccctcaaattaaaacaagatctctcctccctgggtcaccagcttcgtgaccctcgaactaaaacaacaatgctcctgcctgggtctgcagctccacgaccctgaaactagaacaagacttctccaccctgagtcaccagcttcctaacccacgaactacagcaacattgctcctgcctgggtctgcagctccatgaacatcaaactagaacaagacttctcctccctgggtcgccagccttctgacactcaaactaaaacaacagtgctcctgcctgggtctgcagctccatgaccctcaaacgaaaacaagacctctcctccctgggtcgccagcttcctcaccctcaaactacaaccaaatggctcctccctggttcggaagctccacgaccctgaaattcgaacaagacttctcttcccccggttgccagttaccggaaccttgaattataccaaaattgctcctccgtgggtctgcagctccacgaccctcagaccagaacaagacctcgcctcccctgggtcgccagcttcctgaccctcgaattacaaccaaattgctcctccctgggtcgacagctccacgaccctcaaactcgaacaagacttctcctccccgggttgcctgctaccggacccttgaattacaacaaaattgctcctccctggtccggcagctccacgatcttcaaactagaacaagacctctcctccctgggtcgccagtttccggacccaccaattacaaccaaattgctcctccctggttcggcagctccacaaccctcaaactagaacaagacctctcctccctgggtctccagcttccagaccctcgaatgacaaccaaattgctcctccctgggtctgcagctccaccaccctcaaactaaaacaagacctctcctccctgggtcaccagcttcctgaccctcgaactacaacaaaattgctcctccctgatcagcagctccaacagcctcaaactcgaacaagacttctccttcccaggttgccagctaccagaccctcgaattacaacaacattgctcctccctgggtctgcagctccacgaccctcagaccagaagaagacctctcctcccctgggtcgccagcttcctgaccctcgaattacaaccaaattgctcctccctgggtcggcagctccacgaccctcaaactccaacaacacttctcttccctgggttgccagctaccggacccttgaattacaacaaaattgctcctccctgggtctgcagctccacgaccctcacaccagaacaagacctctcctccctgggtcgccagctttcggaccctccaattacaacaacattgctcctctctggttcggcagctccacgaccctcaaactacaacaagacctctcctccctgggtctccagcttccagaccctcgaattacaacagaattgctcctccctgggtctgcagctctacgaccctcaaactagaacaagacctctcctccctgggtcaccagcttccggaccccagaattacaacaacattgctcctgcctgggtctgcagttccacaaccctcaaactaaaacaagacctctcctccctgggtcgccagattcctgacgcacgaattacaacaaaattgctcctccctggtcggcacctccacgagcctcaaactcgaacaagacttctcctccccaggttgccagctaccacaccctcgaattacaacaacattgctcctccctgggtatgtagctccacgaccctcagaccagaagaagacatctcttcccttggtcaccagcttccggaccccccaattacaaccaaattgcgcctccctggttcggcagctccacgaccctcaaactagaacaagacctctcctccctgggtagccagcttccggaccctcgaattacaacagcattgctcctccctagttcggcagctccacgaccctcaaactagaacaagacctctcctccctgggtctccagcttccagaccctcgaattacaaccaaattgctcctccctgggtctgcagctccaccaccctcaaactaaaagaagacctctcctccctgggtcaccagcttcctgaccctcgaactacaacaaaattgctcctccctgatcagcagctccaccagcctcaaactcgaacaagacttctccttcccaggttgccagctaccagaccctcgaattacaacaatattgctcctccctgggtctgcagctccatgaccctcagaccagaagaagacctctcctccctgggtcgccagcttcctgaccctcgaattacaaccaaattgctcctccctgggtcggcagctccacgaccctcaaactcgaacaagacttctcctacccgggttgccagctaccggacccttgaattacaacaaaattgctcctccctgggtctgcagctccacgaccctcataccagaacaagacctctcctccctgcgtcgccagcttcctgaccctcgaattacaaccaaattgctcctccctgggtcggcagctctacgaccctcaaactagaacaagacctctcctccctgggtcgccagcttccggacccttgaattacaacaacatagctcctgcctgggtctgcagttccgcaaccctcaaactaaaacaagacctctcctccctgggacaccagcttccggaccctccaattacaaccaaattgctcctccctggttcggcagctccatgaccctcaaaccagaacaagacctctcctccctgggtctccagcttccagaccctcgaattacaaccaaattcctcctccctgggtctgcagctccaccaccctcaaactaaaacaagacctctcctccctgggtcaccagcttcctgaccctcgaactacaacaaaattgctcctccctgatcagcagctccaccagcctcaaactcgaacaagacttctccttcccaggttgccagctaccagaccctcgaattacaacaacattgctcctccctgggtctgcagctccacgaccctcataccagaacaagacctctcctcccctgggtcgccagcttcctgtccctcgaattacaaccaaattgctcctccctgatcagcagctccagcagcctcaaactcgaacaagacttctcctcccgaggttgccagctaccagaccctcgaattacaacaacattgctcctcagtgggtctgcagctccacgaccctcagaccagaagaagacctctcctcccctgggtcgccagcttcctgaccctcgaattacaaccaaattgctcctccctgggtcggcagctccacgaccctcaaactccaacaacacttctcttccctgggttgccagctactggacccttgaattacaacaaaattgctcctccctgggtctgcagctccacgaccctcagaccagaacaagacctctcctccctgggtcgccagcttcctgaccctcgaattacaaccaaattgctcctccctgggtctgcagctccacgaccctcagaccagaacaagacctctctcctccctgggtctccagcttccggaccctcaaattacaaccaaattgctcctccctgggtcggcagcttcacgaccctcaaactcgaacaagacttctcctacccgggttgccagctaccggacccttgaattacaacaaaattgctcctccctgggtctgcagctccacgaccctcataccagaacaagacctctcctcccctgggtcgccagcttcctgaccctcgaattagaaccaaattgctcctccctggttcggcagctccacgaccctcaaactacaacaagacctctcctccctgggtctccagcttccagaccctcgaattacaacagaattgctcctccctgggtctgcagctctacgaccctcaaactagaacaagacctctcctcccggggtctccagcttccggacccttgaattacaacaacattgctcctgcctgggtctgcagttccacaaccctcaaactaaaacaagacctctcctccctgggtcgccagattcctgacccacgaactacaacaaaattgctcgtccctggtcggcagctccacgagcctcaaactcgaagaagacttctcctccccaggttgccagctaccacaccctcgaattacaacaacattgctcctccctgggtatgtagctccacgaccctcagaccagaacaagacctctcctccctgggtcgccagcttcctgaccctcgaattacaaccaaattgctcctccctgggtcggcagctccacgaccctcagacgagaacaagacctctctcctccctgggtctccagcttccggaccctcaaattacaaccaaattgctcctccctgggtcggcagctccacgaccctcaaactccaacaacacttctcttccctgggttgccagctaccggacccttgaattacaacaaaattgctcctccctgggtctgcagctccacgaccctcacaccagaacaagacctctcctccctgggtcgccagcttccggaccctcgaattacaacagcattgctcctccctggttcggcagctccacgaccctcaaactagaacaagacctctcctccctgggtctccagcttccagaccctcgaattacaaccaaattgctcctccctgggtctgcagctccaccaccctcaaactaaaacaagacctctccttcctgggtcaccagcttcctgaccctcgaactacaacaaaattgctcctccctgatcagcagctccaccagcctcaaactcgaacaagacttctcctccccaggttgccagctaccagaccctcgaattacaacaacattgctcctccctgggtctgcagctccacgaccctcagaccagaagaagacctctcctccccttggtcgccagcttcctgaccctcgaattacaaccaaattgctcctctctgggtcggcagctccacgaccctcaaactccaacaacacttctcttccctgggttgccagctaccggacccttgaattacaacaaaattgctcctccctgggtctgcagctccatgaccctcacaccagaacaagacctctcctccctgggtcgccagatttcggaccctccaattacaacaacattgctcctccctggttcggcagctccacgaccctcaaactacaacaagacctctcctccctgggtctccagcttccagaccctcggattacaacagaattgctcctccctgggtctgcagctctacgaccctcaaactagaacaagacctctcctccctgtgtctccagcttccggacctttgaattacaacaacattgctcctgcctgggtctgcagttccacaaccctcaaactaaaacaagacctctcctccctgggtcgccagattcctgacccacgaactacaacaaaattgctcctccctggtcggcagctccacgagcctcagactccaacaagacttctcctccccaggttgccagctaccacaccctcgaattacaacaacattgctcctccctgggtatgtagctccacgaccatcagaccagaagaagacatctcctccctgggtcaccagcttccggaccctccaattacaaccaaattgcgcctccctggttcggcagctccacgaccctcaaactcgaacaagacttctcctacccgggttgccagctaccggacccttgaattacaacaaaattgctcctccctgggtctgcagctccacgaccctcataccagaacaagacctctcctccctgcgtcgccagcttcctgaccctcgaattacaaccaaattgctcctccatgggtcggcagctctacgaccctcaaactagaacaagacctctcctccctgggtcgccagcttccggacccttgaattacaacaacatagctcctgcctgggtctgcagttccgcaaccctcaaactaaaacaagacctctcctccctgggtcaccagcttccggaccctccaattacaaccaaattgctcctccctggttcggcagctccatgaccctcaaaccagaacaagacctctcctccctgggtctccagcttccagaccctcgaattacaaccaaattgctcctccctgggtctgcagctccaccaccctcaaactaaaacaagacctctcctccctgggtcaccagcttcctgaccctcgaactacaaaaaaattgctcctccctgatcagcagctccaccagcctcaaactcgaacaagacttctcctccccaggttgccagctaccagaccctcgaattacaacaacattgctcctccctgggtctgcagctccacgaccctcagaccagaagaagacctctcctcacctgggtcgccagcttcctgaccctcgaattacaaccaaattgctcctccctgggtcggcagctccacgaccctcaaactccaacaacacttctcttccctgggttgccagctaccggacccttgaattacaacaaaattgctcctccctgggtctgcagctccacgaccctcacaccagaacaagacctctcctccctgggtcgccagctttcggaccctccaattacaacaacattgctcctccctggttcggcagctccacgaccctcaaactacaacaagacctctcctccctcggtctccagcttccagaccctcgaattacaacagaattgctcctccctgggtctgcagctctacgaccctcaaactagaacaagacctctcctccctgggtctccagcttccggactctccaattacaaccaaattgctcctccctgggtcggcagctccacgaccctcaaactagaacaagacctctcctccctgggtcaccagcttccggacccttgaattacaacaacattgctcctgcctgggtctgcagttccacaaccctcaaactaaaacaagacctctcctccctgggtcgccagattcctgacccacgaactacaacaaaattgctcctccctggtcggcagctccacgagccacaaactcgaacaagacttctcctccccaggttgccagctaccacaccctcgaattacaacaacattgctcctccctggatatgtagctccacgaccctcagaccagaacaagacatctcctccctgggtcaccagcttccggaccctccaattacaaccaaattgcgcctctctggttcggcagctccacgaccctcaaactagaacaagacctctcctccctgggtcgccagcttccggaccctccaattacaacagcattgctcctccctggttcggcagctccacgaccctcaaactagaacaagacctctcctccctgggtctccagcttccagaccctcgaattacaacaatattgctcctccctgggtctgcacctccaacaacctcaaactaaaacaagacctctcctccctgggtcaccagcttcctgaccctcgaactacaacaaaattgctcctccctgatcagcagctccaccagcctaaaactcgaacaagacttctcctccccaggttgccagctaccagaccctcgaattacaacaacattgctcctccctgggtctgcagctccacgaccctcagaccagaagaagacctctcctcccctgggtcgccagcttcctgaccctcgaattacaaccaaattgctcctccctgggtcggcagctccacgaccctcaaactccaacaacacttctcttccctgggttgccagctactggacccttgaattacaacaaaattgctcctccctgggtctgcagctccacgaccctcacaccagaacaagacctctcctccctgggtcgccagctttcggaccctccaattacaacaacattgctcctccctggttccgcagctctacgaccctcaaattagaacaagacctctcctcccggggtctccagcttccggacccttgaattacaacaacattgctcctgcctgggtctgcagttccacaaccctcaaactaaaacaagacctctcctccctgggtcgccagattcctgacccacgaactacaacaaaattgctcgtccctggtcggcaactccacgagcctcaaactcgaagaagacttctcctccccaggttgccagctaccacaccctcgaattacaacaacattgctcctccctgggtatgtagctccatgaccctcagaccagaacaagacctctcctccctgggtcgccagcttcctgaccctcgaattacaaccaaattgctcctccctgggtctgcagctccacgaccctcagacgagaacaagacctctctcctccctgggtctccagcttccggaccctcaaattacaaccaaactgctcctccctgggtcggcagatccacgaccctcaaactcgaacaagacttctcctacccgggttgccagctaccggacccttgaattacaacaaaattgctcctccctgggtctgcagctccacgaccctcataccagaagaagacctctcctcacctgggtcgccagcttcctgaccctcgaattagaaccaaattgctcctccctgggtcggcagctccacgaccctcaaactccaagaacacttctcttccctgggttgccagctaccggacccttgaattacaacaaaattgctcctccctgggtctgcagctccacgaccctcacaccagaacaagacctctcctccctgggtcgccagctttcggaccctccaattacaacaacattgctcctccctggttcggcagctccacgaccctcaaactacaacaagacctctcctccctgggtctccagcttccagaccctcgaattacaacagaattgctcctccctgggtcttcagctctacgaccctaaaactagaacaagacctctcctccctgggtctccagcttccggaccctccaattacaaccaaattgctcctccctgggtcggcagctccacgaccctcaaactagaacaagacctctcctccctgggtcaccagcttccggacccttgaattacaacaacattgctcctgcctgggtctgcagttccacaaccctcaaactaaagcaagacctctcctccctgggtcgccagattcctgacccacaaactacaacaaaattgctcctccctggtcggcagctccacgagcctcaaactcgaacaagacttctcctccccaggttgccagctaccacaccctcgaattacaacaacattgctcctccctgggtatgtagctccacgacactcagaccagaacaagacatctcctccctgggtcaccagcttccggaccctccaattacaaccaaattgcgcctccctggttcggcagctccacgaccctcaaactagaacaagacctctcctccctcggtcgccagcttccggaccctcgaattacaacagcattgctcctccctggttcggcagctccacgaccctcaaactagaacaagacctctcctccctgggtctccagcttccagaccctcgaattacaaccaaattgctcctccctgggtctgcagctccaccaccctcaaactaagacaagacctctccttcctgggtcaccagcttcctgaccctcgaactacaacaaaattgctcctccctgatcagcagctccaccagcctcaaactcgaacaagacttctacttcccaggttgccagctaccagaccctcgaattacaacaacattgctcctccctgggtctgcagctccacgaccctcagaccagaagaagacctctcctcccctgggtcgccagcttcctgaccctcgaattacaaccaaattgctcctccctgggtcggcagctccatgaccctcaaactccaacaacacttctcttccctggtttgccagctaccggacccttgaattacaacaaaattgctcctccctgggtctgcagctccacgaccctcacaccagaacaagacctctcctccctgggtcgccagctttccgaccctccaattacaacaacattgctcctccctggttcggcagctccacgaccctcaaactagaacaagacctctcctccctcggtctccagcttccagaccctcgaattacaacaatattgctcctccctgggtctgcagctccatgaccctcagaccagaagaagacctctcctccctgggtcgccagcttcctgaccctcgaattacaaccaaattgctcctccctgggtcggcagctccacgaccctcaaactagaacaagacctctcctccctgggtcgccagcttccagacccttgaattacaacaacatagctcctgcctgggtctgcagttccgcaaccctcaaactaaaacaagacctctcctccctgggtcaccagcttccggaccctccaattacaaccaaattgctcctccctggttcggcagctccatgaccctcaaaccagaacaagacctctcctccctgggtctccagcttccagaccctcgaattacaaccaaattgctcctccctgggtctgcagctccaccaccctcaaactaaaacaagacctctcctccctgggtcaccagcttcctgaccctcgaactacaacaaaattgctcctccctgatcagcagctccagcagcctcaaactcgaacaagacttctccttcccaggttgccagctaccagaccctcgaattacaacaacattgctcctccctgggtctgcagctccacgaccctcagaccagaagaagacctctcctcacctgggtcgccagcttcctgaccctcgaattacaaccaaattgctcctccctgggtcggcagctccacgaccctcaaactccaacaacacttctcttccctgggttgccagctaccggacccttgaattacaacaaaattgctcctccctgggtctgcagctccacgaccctcacaccagaacaaggcctctcctccctgggtcgccagctttcggaccctccaattaaaacaacattgctcctccctggttcggcagctccacgaccctcaaactacaacaagacctctcctccctcggtctccagcttccagaccctcgaattacaacagaattgctcctccctgggtctgcagctctacgaccctcaaactagaacaagacctctcctccctgggtctccagcttccggactctccaattacaaccaaattgctcctccctgggtcggcagctccacgaccctcaaactagaacaagacctctcctccctgggtcaccagcttccggacccttgaattacaacaacattgctcctgcctgggtctgcagttccacaaccctcaaactaaagacctctcctccctgggtcgccagattcctgacccacgaactacaacaaaattgctcctccctggtcggcagctccacgagcctcaaactcgaacaagacttctcctccccaggttgccagctaccacaccctcgaattacaacaacattgctcctccctgggtatgtagctccacgaccctcagaccagaacaagacatctcctccgtgggtcaccagcttccggaccctccaattacaaccaaattgcgcctccctggttcggcagctccacgaccctcaaactaaaacaagacttctcctccctggttcggcagctccacgaccctcaaactagaacaagacctctcctccctgggtctccagcttccagaccctcgaattacaaccaaattgctcctccctgggtctgcagctccaccaccctcaaactaaaacaagacctctcctccctgggtcaccagcttcctgaccctcgaactacaacaaaattgctcctccctgatcagcagctccaccagcctcaaactcgaacaagacttctcctccccaggttgccagctaccagaccctcgaattacaacaacattgctcctccctgggtctgcagctccacgaccctcagaccagaagaagacctctcctcccctgggtcgccagcttcctgaccctcgaattacaaccaaactgctcctccctgggtcggcagctccacgaccctcaaactccaacaacacttctcttccctgggttgccagctaccggacccttgaattacaacaaaattgctcctccctgggtctgcagctccacgaccttcacaccagaacaagacctctcctccctgggtcgccagcttccggaccctccaattacaacaacattgctcctccctggttcggcagctccacgaccctcaaactagaacaagacctctcctccctgggtctccagcttccagaccctcgaattacaacaaaattgctcctccatgggtctgcagctccacgaccctcaaactagaacaagacctctcctccctgggtcgccagcttcctgaccctcgaactgcaacaaaattgctcctccctggtcggcagctccacgagcctcaaactcgaacaagacttctcctccccaggttgccagctaccacaccctcgaattacaacaacattgctcctccctgggtctgcagctccatgaccctcagaccagaacaagacctctcctccactgggtcgccagcttcctgatcctcgaattacaacaaaattgctcctccctgggtcggcagctccacgaccctcaaactagaacaagacctctcctccctgggtcgccagcttcctgaccctcaaattacaacaaaattgctcctccctgggtctgtggctccacaaccctcagaccagaacaagatctctctcctccctgggtctccagcttctggaccctcaaattacaaccaaattgctcctccctgggtcggcagctccacgaccctcaaactcgaacaagacttctcctccccgggttgccagctaccggaccctcgaactacagcaacattgctcctgcctgggtctgcagctccacgaaaatcaaactagaacaagacctctcctccctgggtcgccagctttctgaccctcgaactacagcaatgttgctcctgcctgggtctgcactccacaaccctcaaactagaacagcagcaccagctgcttcctggacttccagctcaatgactctcacacttcaatggcagcaatggctccacccccaggctccagctccaacaccctcagatctgagcagcggcagcaccagctcctttctgggtcttctgtttcacgatccttaaattagaacagcagcaccatcttctccctgggtctccagctccacgaaactcaagctagaatagcagcaccggctcctctgggatcttcagctccacgaccctaagacatcagtggcagcactggctcctcccctgggctccagctccaggaccctcaaacttgaacagaaacaccagctcctccccaggcctccagctccttgaccctcataaacaatcccttcttatgaaatgtagcagtcaggaaaactgtagaggaagtaaataaataaatggtttcctttcaaattgatgtttcttttctgttcacgcaagtcaggaaacttttctactttccatcaaccttgcaacctacttgcattcaattgtaagatggaaatccatcatttgaaataacctttaaaaacttagtagttcttttttactatgatcttatctcacagctctagaaacgatctttcactttgcctgtgcagaagtcttgtgaacattcaaactatgaatttacttggttgagattcctagaatacacattatccccagatgttcctgccctccttaaaatcttctaacaagttcccctcacccgagcataaatgccagtttcctatccacagcccacagtgcccagcacggccctgccctctgccctgaccttatggtctcccctctgctgttactttcctcccagacaggcctctgtcacttcctcaaaccacacaggctcaggcctgactccgggcctttgcccctgctgtgccccctgcgtggagcgcctttccccggctccccatcctcctcaacccgctcagctccagcctgctggccgcctctcagtccatgaacacacgatgtcctccccccaggcctttgcacatgctgttctctgtgcctgaaacccgtcccccctcaccatctgcgttcacttttctaatttccattcatccttggagtctcccctgaaatatcgccccccgcctgcccccaccacttggacttaaccttgcttaggttgaaaacccccatctcctgactccaggaagctagatgctatcctggcacttggaactttcccattacaacgttttgcgcactcgtaatttattctattaggttggtgcaaaagtcatcgcagtttttgtcattactcttaatgaacggcagcgccagctcctccccgcttttgtttgccattacctttactggcaaaagccggaattactgctgcatcgacctaatagaataatttatatttattcacctatcatctgtcttgccctctagaaagtaagctccatgagaatagggaccaaatctactccaaccactccagcttcctagcacattgtcaataattatttaccgactgactgatagagaaatatcttcattgttgctgggatgagccacataacatgacacgcccctttgaaagtcaatgtcatggacagttagcatttgcttttcactcctgcacctgtggcttggctgggcttaggctgatctagtctgggcttgactccaggctgagggttggaaccctgcgtgctccacacgcctctcatcctgcagctggagtcaaagttccctggggcacgctcgtctcgtgggaaaaatcaagagcattagagggcaggcctggcagtgccaacacattccaggcttctgcctgtgccgtgtctatgaaaatcttgttggcataagcaagttacccagccacgagcaatacctatgggatagataagtctgtccaccctccctcgggccctggtaaggatgtggatgtgtcatactcttacaggggtagtgaaatattgaggcccaacgttaaatcacctacagcaagatatgtcagcctctgtgtccccacgctggaatcatgcttcaccagcgggtttacctgaaccgactcccctttgcaatggtgcctgcaggtttaggccaatgctgttccctgtgaaggacagagaagcctcaattggcctccgactgttggcaagaacaagatattaggttggcataaaacaaccacaagccccaggtggcccgtgcccattgagacaggagaggggcaggaagaactgtgggagctcagggagcttcccatccccagtcccctccctccccctcttgtcccatctccgctttcttttttttcctttttttttttttcttgagacagggtctgactctgtcacccaggctggagtgcaatgttgcgatcttggcttactccaacctccgcctcccaggctcaagcaatcctcccacctcagcctccccagtggctgagaccacaggtgcatgccatcacacccagctaatttttttttttttttttttttttttttttgtagacacaggattttgccttgcccaggctggtgtagaactcctgagctcaagcaatctgtccacctcgacctcccaaagggcagggattacagacatgaatcactgagtccagcctgctttatttttctttacagtacctggaacgttctaatgtactaagtagacgtgtattttctttcttttttctcttccctagaataggagcttaatatgggcaggtacttttgtttgtctcatttatcaccctatccccagtggctggaacagtctccagcacatgaatggtgtgttcttaataaatatttttaacaaataaataaatgaaatatcctacaagagaaagctagtatttggaactcacccatcaacagaaccaaaaagccaaagacctttagcctgtccctacttctgaatgcacccaaccccacaggagccagcagagaaaaaacaggaacaaaggtggggaaaagagcaggtggttccccccgcaactaaggaccctcgaggcttaggctgaacttgagctggagaaaggactaatgtaggaactgggtgtgagataaaagtttagatttgtctggcctggattttgtaacacctaaacacgagttattccattcatttttgtttttgtttttttgagacagagtcttgctctgtctcctagactggagtgcagtggtgtgatctcagctcactgcaacctccgcctcccaggttcaagtgtttctcctgcctcagcctcctgagtagctgggattataggcacatgttaccacgcccaggtagtttttctattttcagtagagaaggggtttctctatgttgaccaggctggtcttgaactcctcacctcaagtaatctgcccacctcagcctcccaaagtgctgggattacaggcatgagccaccaggccctgacatattccattcattattaagaagtctgttatgataaatcaaagtgaccaaaatcctagggaaacttccccagatgtcatcaagaagcagagaccagagacctatcagcaggatggggactagggcgaggcaggggagggaggcgctcatctctggattatcagggtccagcaagggaggtataaagtttaagggggcaccaaaaaatttactgatcaggccgggcgtggtggctcacgcctgtaatcccagcactttgggaggctgaggcaggcggattatgaggtcaggagatcgagaccatcctggctaacatgttgaaaccccgtctctactaaaaatacaaaaaattagccgggcgcggtggtgtgcacctgtagtcccagctactcgggaggctgaggcaggagaatcgcttgaacctgggaagcagaggctccagtgagccgagatcgcgccactgcactccagcctggatgacagagcaagactccatctcaaaaacaaacaaataaacaaacaaaaaattcactgataaataaataataaatattatttaatataaataaaataagtatttaatataaataaaataatattttaatgcaggtttaaaaaaaatcaaatttaatgcaaaaaaaaaaaaaaaaccctagtgggaaaagttatcaacatttcaactaagatacaatccaaccctgcatttgcatgatttggcctcacttactcaccctaacccaaccctgcctcacagaagctgctcgaaggcagcggttggagaaaaatgaatccatttcctgctcgtatctagttcagaccttccataaaccagctacaggtaagactgtgatgacccacctgtgccaaccaggaccacaatctaccatcagggccacagtaaccgggtccatgttgactgtccccaggtgcacccagatgtttgacttaggggctcaggccagggttgcttctcccattgatattgtgcacttgttaagagaaaacagacaagactgggcacagtggctcactcctgtaatcccagcactttgggaggctgaagtgggcagatcacctgaggtcaggagttcaaggccagcctggtctacaaggagaaacctttgtctcttctaaatatacacaaatcagctgggtgtgaggcacaagaatcacttgaacccaggaggcagaggaacccaggcaggccgggaactctgccatgggaagcgggtgtctgagagcaaggtcagtgacaccatcttgttcttgggactgaactggaggcagggaagccaggagaagccctgggacccggcctctggatgttcaccatgggtaggcagctgtttgcagggagatgcctgagggacccccaggttcctcatgaaaacctacagctccggtaaaatctgcactttccagcctgggctgcttcccactgtatgctcctgaagccagacgccttcattctgacccctggcaattccctgcatagacccgcatgtttcaggaggatcctgacctggatctcagaccactgcttcccatggcagacttcccagccaagcatttcctgaaaacggtcttctcagattttcttctgagatgtggccaaggccctgaaacagagtctccctcccacacaggttcttacctgtgaaacaggacatggtgggaatggggaggaaaggttcagccccagacaaggaggccctcccatggggacgtccaaagagaaagatcggacccatcaaacctcagaggctgcccttggacctcaggatggcatccaaacccccacaggtccctgcccccgtccagtcccacctcccaccactcactcctgtgtccacttggtcatggccacactggtctctccgctggccttggacagaccaggcttccaggaacctcagggccttggcacgtgctggcccttcctcctggtatgttccccacccccaccctgatcctcacccagttacctccaggaacctcgtcacctgttaggtctcagatgaatgtcacctccttggggggattctcctgtgtcctcatcacctcctcgcccaggcccagggcccaggtcaggtcccccaaggcccctcttatcacactgtagtgtcttttcttcccagccaggaccacgtgtaatgaaacaaggccattgttatctgaggacaacccatacaactaaaaagcccattcaaggtaaattcaattaaattgagtaccaaagtttcacaacaaatgctttgtgatttagttaacaaacatttaccttggattcactttaggccaggcgctgttccccatactccatgtgtattaaatcatgtactctccaaaacaggcactactacatcaccgtccccattttgcagatgaaaacacagaggcacagaaaggtggttgcttgtgtagaaatcggcatcatcaggactggattaggtcaccctgcaccagaccccctgctctcagccatgtacttgccacttcttctaaaaaacaaaacaaacaatcaaaaaaggtctaatgagggtcttctctagaaaagtaaagctaaatgtgatgaaaataagtttttatttcctgtctaacatttgggttatagtggcagatgtacccccattcttaagtaatcaaagaatgaatcaagtactaatttttttgcatatttttttctgataaaactgtagccacagtcaacctctttcccccaggtttgagttttgcagcctgatcaaaagagtcattttcaaaaacccccaggggctccagagcctccacaggggcccctcttcctcctggcattgtctctattccctttgggatattctgctggatttgaggagatcctcattcctgctggttccacttctttcagtgttcatcagtctacatgttccaggtcctcactgttggactctgtgggtgacgcaaggaatacttcctattgcatggtgggatatacaggctcacccacagccccatggtgaacccaccccacatccgctgtgaaacccctagtaaggaccagaccaatcattcacacccagtggagtgcaggcagccagctctgagaaccaactgtgaaatgttcagaaattttgttaattggtgttaaacctctggtagtttgaaatcagccatgttgggagtatttataccaggaaaactgggcttttcttgaccctaaagtgctggtttatcggcccagcactgaagttatacctcacgcacagccctgacttttggatggaaactaccgttatcctatttggggtcgcttcccagtggctcccatgtccaagaccccagctttctctttctctcttcacccactttggattgggagcctcaaaaccactgtgctgaaaccacttctaggcatcagcaccattcactaacagcacactggcctttgttctaagacagggattcagcagttacatagatgtgcactgagcactgagctgtcctaggtgctgaaatgatttcatcaggagcaatcagaggctgcctagtccaggaatctcagacatttgaccctggctgaatgcccttattggagcaggaaagaagtgcaacagtttgcaataaaataggcccctcatttgccatccagggacacacacaaagaagcaacagtgaacagtcagtacttcacccagattcaagcaacacatcccgacctatgtggtatcctccctgtgacacaggaacggggtgggagaggagttctctagccacttgcctcccaagctcatccatgggaaagcatcttgctcccaagctgtcagggagaaccacaaaacccccctcagccggcaggaagcttgccccaccctcttccccattcaccccctcactttctcccctcctccactgacactcctcaactccctggactgtccactcagccccagaccttctctcttctgcccccactgtgtcgtgactgtcagccattcctccctagtccagaaatgtccatgagggtgagagagcagggggaggacaggaccctccaggatgacctggcctcagaaaaagagcatctaaaacacatcggaggcatcgccttgtgaagcttcaactgccagcaagtcccatccacagattctgtcttctttgcacaaacagcatctgcctccttcctggcttgttgttatcagaatctcaagagatgccagaccccaggaaatgtggacagaggggctctgatctgtctcatctgtttgactatttgattaatatcctcccttgctctgccttccccaccatttcatcatcaggcccagccacaggcttggcacgttgcaggcgctaaacaaatactttcctgaacaaatgatgaacactttggtttggacgggggctattaactttttgaccttagggtgagaaccatttcacacacactttcaataatcaagaaatacttaattgtaatttattcaagggtattttttctttctgagatgtttagttcctattttcgtttctttgtccatgtgggaagtaaacagcaaattgcctgcatgtagaatgtattcagtggagctgccttaattagctaatttactcatgtctcactggagagcaatcagaaagagtccttgtaggtgctgtttaagtttgcaaaagtgtccttcccttccacagccacagatgtcctgggcagctggacctggggaaggggcaatatattcccacccactcaccctaatttccacacccagccgctgactccattgtaacagagcactgggcaaaacattcctgtgcctaacattcttcctcaggagcgtcttcaaattgtggcggaagcccctgagtttatgcccgtggagctctgaaccctgcaaagggctggccaggggtggggaggctgtgccccaccctccactcagggctcaccccaagtcccccaggggtccccagtactcactgtgaagcaagaagtggagcaccctgatggggaatggccctgccagggtcatgtcccacaaactgtgtaagcaaaggagacagcacctgctttccaaggcctgcccaatgggccaaggttcagcttaggtgagagggcccggctatccctacccatgtttcagctcaggggataaaacccttcctgctacaaagcttccttttacaagcagataaaccctggccaggacttctaaaatctttacattcaggtagcttttggccaatctttggtgaatttgtttaatcatatttctttactggaagtcattatctgagatgagcaattttttactggggcaggtttgtgacttcaatgagccttgccttccttgtctcttaaaggtcaccattggaaatagatcgacaatgtagcacgaaagtacctagcacagtgcctggctcagacattctatcagcagctacctgcctccagtctgtcctcctctctgttttctgcattatctctttctgtagtataaaagagacaacttttcttcaaagctgtctagattttagcctttggaagttcaaaaacattggccagttacccatgtcatagtgaggcaggagaatagggaattggggtaaccaaaggttaagacataaagaacagcaggtgcagccaattttaggcaagattaggcagcacacagtccacaccctcacttctgcaataatgagacacaaggttccacttcagcctctgattggtcatggaccaatccttcatagggcgtatccaatcagatgcctctaaaagagcacctagaggtgttaccaaattcttttagcttaataaaaatccctaaagaacattgtaattggggctcttgagcaacttgcttgagcccactcccactctgtgaagtgtactttcacatcagtaaatctgcactttctttcgttgctttgtttttctgttgctttgtctgtgcattttgttcaagtctttgccaagaacctggacaactcacagtcaggactttccatctggtaacaatagcattaattgcagtaaaaggatgagctttctcagggcaggctaagcccagctgcccacagtcctgaccacaatacctgtcccttctgattttttttttttcattttttccccaatttcttagctttaaaaaatgtcaactattcagaaacatacagagtagtacagtgatcacatacccttcaaatagcttcatcaactgataacaccatgtgtgtgggtcacctatctccacgagcattatttaaagaaaattgtgtgtgcgcatgtgactgtgtgtgtgtgcatgcatgtgtgcacacaattgtgcgtgtgtgtttccttttctggcaaaactatttgaaagtatggtgcaggggtcatgatagttcacccctaaacacttcagtgtatatctcctaaagaaaaaaataatttcttacataatctcaatgccattttcacacccaaacatttcatgttgatgcagtgatataatctaaaatacagtccaaagtgagagcttttattttcaatttagcatccaatctaggaccacactgcatggcttgacatgattctttcattccctgcaatgtcaagcagcgagtccatcatttcatctcttgggatgttgacttctttgaagattccagccagtcgtattgtaccagaaagccaagaagtgctcaaaagatgatggaaattggtcaaaaggaaacagaagctatagtcagaggactttcaatggacaaatgtagaagtatttgagcatcaaaaatatatgggagcaagaatgaacacactgaattttttaaaaaaggatctatgagttcatagtgatactaaaaaaagctgattggagccaggaagaattctttacagaataacagcagctgatatatatgaagaatgacggaatttgaaaatgttacaattgactcatttgaggaccatctgtggatgccaaaaccattgggggacagattttgaagaacaggatatccataaggtcccaaagcatcaccgcatatgttgcttggcaattacacaagggaaaaatgatcctttgcaatagagaaatctgatggccagcactttaaccaagtgctcaagctcaacacgagcagtgaacagacatctcaagcctcactccggctgtaatgagctgggcagagcctccctctgtagcaatcctggccacggcattcggcctgcacctccccagggaagaagcagactcgggcagactgtggcccttctgcaggccagcgacacaggctcgtctcacttcacctgggtggtacagacactggtccacagacactccttgctttgagctctgccccgtccagacctgtgctggagttacagatacagagatggatgatttgccttcaaggatgggaaggatgggaaggatgctcaggaatctgtgtccggggtctctggcacttggacagcttccaaaacaactgtgactcctccactgaaggaagaaatgaaaatacacgtatctgttgtttcttcttcctgatcaaaccaggtggaaccgtttaggaaaaaatctgttgttagaggtatactcaggaacgatttgtggactcttggtcgtcctatcaagtgagacatcggacgaaatagggaccactatcgtcactctgccatcaggattcgtgactgcaacatcaaaaggcgctgtagaagcattggaaaagcacctggtgtaaagggagcttttatcagtagtctgagcccctctccattgctgctgctgttggaaaagccaacttggctgcagacagtagcaacaggcttcagagtcagcccagaagcagcaggaggtggagtctgcaacagccaaattaggggtgactttgcctgggatctgggttctttagagatgccaaatattcacttcagaaggctgcagaggtggacccaggaggcgtcactcactcagtgcatatttaagcagggccgactgtgcaccaggaacgattgtagtctctggccacagcaaagaacaaaacaaagacccctggcttcagggagctcacgacccacagagggacagaggacaagcaggtgacagcccaagacagtgcacaaagcagaagctggtggtgccgcctgggtcccgcaggcctcagagtctttgccctgcgatggcttcttgctgcccctgctctcctgcggctcctcctcaggctgcaggagcctgtgtggcctgggagtggagtcctgggaagctgccctgggtgaacggaagctggcggggagcagacctggcttccccgcctctccagtgcagtcctctgatgctgctcctaagcgtctccatgaggtctccagtgcagctgagcaccagcagcccaccgtgggcacctcctacttatcccaccagaaagggcattttttccttcccatttccctccccaccgtcttgcccgagcttcctggggacttctccaggtgaactgagtcatgcccactctcagagtcagcttccagaagaatccaaccgaaggccatgtgtgacacgcaaactatgtcagatggtgggaagtgcactggaaaaagacaaagctgggaagggagggggtggtggttggggggctgtgattgctcatggacatctgaggagccccccaagaagggggccttgcagcagctgcccaggcggtgagggctcagcgggtggatgtcccggagaggagcatcccagggcggccaggactaagggtaagatcccgaggtggggagctcctggcctgtcctaggaagaccaagaggccatgtgaccagagcaaggggacacaggagagaagcaggaaagagaccagcaggtggaaggcaccagaggctcagggccctgttgaccagggaaaggctgtggctgacagagtgaggctgcagacctgggctcggtgcagggcatggctaatctgaatcattgaatagaatagactgtggtggaggctaggcagggagaccagggaggcccatggtgtgatcatccttcgagagcagccaggcaggagcaggcaggtgggcggagtgcaggaatcagtccatgtggacagcagagggatggaggtgctgagcggtcagagggtgggtgccaggaggggagaggagctggccatgtcggcctgagcacctgggcaggaatagccaccatcacggaggtggtgggggtgaattgaggaggtggagaggaaaacccatgactatttgagttggagagagcccaaccacagctgaatgcatgaacctggacatcagctaaaggtctgggctggacagagaagtaaacatttaaaaataaaaatcaaatcaggtcaaaatccccaaaatatgtcacatgatccttttcaatcttggaccccccatctgtggaatacatagacttgtgatgcaaactaggagccagatgaggacctatgctgttggagctggactacatggatcccccaccatagccccacaccaacccattgctcttgccccgggctggggtctccagaagcagaaactgagatggagttttcagttcaaaatacttctaaggaccaacacttgtgaaaggtacttggtggggaaaggcacgctgggcaggggagaagttgatcttcaaggcaggcctgacgtggcctccacaaatttgcagaggttctgaaacaaatattgcttgtaggagtcaacccatgttgggcccaaattaccaggcttttattccctgacttccccagccaccaggagtgagctgtcctggaaaggtcatgaccatggacaggagggctctctatagctttatcccttatatatataaaaaaaaattgcaagaaaatctaagatattacaattataatctagggaggttgataagactttacaaaccaagatggataatcttgatatttaaaaaaccgaaaataaaaaaatttgaaaattttgtacataaaatgattaaacaagctatataaacctgtatttgtaagtgaatactagacaaggagctaatttctgtaatatacaaattcttacaaattgacaagaaaaggaggtgatagctataaagaggtaattcacagaaaagcatctctctgctcttgaactgctagaaatgcaaactgtaaaaataaaagtacccaaaccttatcctaaaatgcacagatgtttactgcaagtgttgtttatagcttcccagaactggaaacaaaacacattcccattatgagaaaaatggctgagcattttgcatgtatagccacccaatggaatttccacagctattgtaaagaacaactttaatttagagccatataagatgtcttgaaggtatatcaacaaggagttaagtgataaaatcaagatgtagaaaaatgttagttatgggtctgtcaatcctggtgatctctttaaggagctaacttttatctttgttaatcttatctattgcctttcatgtactatttcgtttacttctgctcttccctttacctacatatttcatagatacgtatcgacgtattcattgtacatatctacgtattaattctacatacttctggtttacttttttttctagtgtcttgaggtagaatcttaggtcactgattttttacctttcttttttgttatattacattacattacctttaaagatataattctttccctctgcaccgctttagctgtggcccccaaattttgatgttgtatcttatcatttggcaaaattccctcttaagttcatttggactaaacactggaatgatttagaacaaaatatgaagcaaaccatagttcaactggtgcacaaatttagccaaaagatcctccctccatagcgaaggtgagaggatcgcttgagcccgggagttcgaaaccagcctgggcaacatggtgagaccctgtctttacaaaagaaaaacagaagttattgaggtttgtaacttgatattgtggcattagttggaaaagccattttacttcaaaactggttaaagaggttaaaaaaatattctatctgtcaggagtgaaactgaaagctaattgagaatcccagttgagatcttggaattttgtttgtgtgctttacttggaattgtccaccttatgtgcttacaatgactgggtgtctcccattatctgtacagctttcccttagtaatagaacccctgttaattagcagtttagctggtgcatggcagcccagaagaaggacggccgtttccagcctttcttgcagcgatgtgtggtcaggtgagtaagtgctgcccagtggaatgtgagtgcaagagtggcgcccctgccaagttgtgcccaaggaggaaagggtgtgcccagctcttttctcacttctcactggctgaaatgcagacaggggtggggcatctggaccaagtgaaggaagccaatggcctagggatagcagagcaaaaagacagagggaaacggggtccctcaaaacttcacaaactggaactggcacaccagctcagctgttgacatgagtgagaaatgcacttccagcttgtataagccactgtctctaccacagtagccaaagctaaatcccaatggatccagagcccagagacaccaagtgatgacctatggatattctgatctggtctgtggagactgggtttctctgggtattttctacacaatcaaactcaattgaggataaatatgcaggttttagagccgttaaacataaactgggccagaaatagaaggagctgattttgtgggtggaaaaaatgagtcctaaacagatggaatgaattactcaccaaaattagaagcatgtttcctacaatttgcatattaatggtctatcccaaacacaaagtgaaggaccacaggccacatctggctagaggatgtgatcagcccacagcactcgggtctgtacagtttgttttcaacatttaaaaatgaggccaggtgcagtggctcatgccataatctcaatactttgggaggccaaggcaggaggaacacttgagcccaggagtttgagaccagcctgggcaacatggtgagatcctgtctctacaaaaaaaaaaaaattaaaaatgatctgggaatcgtggcgtgtttctgtagtcccagctgctactcaggatgctgaggtgggaggatcgcttgagcctggaaggtcaaggctgcagtgagtggtgatcacatcactgtactccagcctgggtgagagtgagaccttgtctcaaaaaaaaattttatattaaaatatagatttccatcttcctctgaaaaatcaaagacacagcaaacttgtgccctttttactgggtgactcatggcctgaggatgtcacagccacctcattgcaccggccagtgagcctagacttgccacagtgctcaccacctgctgtccctcaacagagaaggcgagagtcatcactacttattacctctcatgctgctggcctttatttccattcatgaaaacaaatctttctacccacctctctattataaaaataaatagatggagagcatccatcaacagatgattggataaagaaaatgtggcatatatactttctgccatagtattcctaaatgtgaaaaatatacacatatatatattcacagaatagaacatagggtaggaatactacattctatgaataggaatagcattcaatagaataggaatactattctgacataaaaaagaatgaaattggccaggcgcggtggctgacacctgtaatcccagcactttgggaggccgaggtgggcagatcacaaggtcaggagtttgagaccagcctgaccaacatggtgaaaccccgtctctactaaagatacaaaaaataagccaggcatggtggcacacacctgtaatcccagttactcaggaggctgaggcagaagaatcgcttgaacctgggaggcagaggttgcagtgagctgagatagcaccattgcactccagcttgggtgaaagggcgagactccatctcaaaaaaaaaaaaaaaaagaatgaaattatgtcttttgcagcaacatggatggaaccagaggccatttaccttaagttaaataactcagaaagtcaaaactgcatgttctcacttataagtgggacctaaattatgtgtgcatgtggatatagagtgtggaataatagacattggagactccaaagggtgggagggctacagcagggttacggatgagaaattccttaatgggtacaatgtacattagtggagcgatgatgacactaaaagcccaagcttcagcactatgtggcatatccacattaacaaaaccgtactcctgcccctttgatttatacaaataaactcttcaaccacaccttggtgattgagccatttgtgtcctgccatttgttctctgacaggtacacctggctatttgtttcctttcatagtcattattatgacctgaagtactggagaatgtcatcaaatctaagatgccagcaactataagatgcaccattattttacacactgctgagaagggaaaaacactgacaaactgcaacacaatgacactattaagatgcactccaattttaaatattaaaatgtgcaacaaatggtgtatttccaaatcaacaaaatatattatgaattgtgttttttgtctacctcctccccaggagtgtaagctccctgagggcagggaggttgtctgatttcttccctgttgcatcccaatgtttggctcatggtaggggctcaagagatactttttggatgaaagaataacatccagccctccatgagcactcctgctcctcagggtgtaaccctggcacacagcatgctgagccatggtagagcacttaccactttcctatgatgatttggaaatgtcctgtcatcctctttcaccaccgaaccttccaggaccgactccatcttctctcccagcctgagccagaggctcgaatgaaggtggggacttccaagcttcactctcaaggtctccgagagctttgcccttccctagccccaacgctattgctggttaactttcctgcagtctcagacacctgggagccaaagtcttatggaaacaaaatggaaatgtacataagagcccttggggatttgcagaggcaacattcccaaggcttaatcacatggaattgttcatatagagcttcttccagcttgatgtgaagggatttaaaccccttccttcaattttatttcccagcctgctgtggggatgtgtgtaattcttatctccgtcacagttaatcaagcgcccatactaaggagataacgtcccttccctccgcacctgacttagggaattaaacggctgcatatctgttgctccaactgcatggaagtccacagtcctccccaaacctcacctcgagcttttcaagtaatggatttcgataagggcataataatcaccatcttctttcagtttaaaaatgcagtgctgggtaaaataatgtttctagtaagagcagaaaacatgggaatatcgtggataaagtgcagacagaaattggcgataagggaggtggggagatgggaagctctgggtgaagatgaagatggggacagggtggggatgaggtcctggagtgcgggtaataaggaaacctaaagctgccaacataattaagactgcccgagccaggagacacacggggcattttttaaggatgtaaggtgtgagaggtcattaaactaagttaccagagcttccaagagacaaggagagtaattgaatgagaggccctgacattgcagaaagtctaaattaattcttttcttggctgctcatgcaggatgaaaaagcagttaccagaaataaaagataaccaaaatatttttgaacatacacaaaatgagtgtgtgaggggggagtataactatatacctacggagagaagagaaagaagtggagaaatgaggggggcagggaaagaaaccctaataaagggaattgaaaaaatcattcattttttgatgttacagtgggagtttctgtgacacaaatatacttgaaaagctgcctttgacctgccttttgagccatagttgatacttacctcatgcagggcaggtaagccccacagtggggcttagttcaggagggttcttggctttgtgcaagaaagaattcaagggcaaaccggaggcagaagaaaacagctttattagagagccagtattactgctctgtgaccgctcctgcagagcagggctaccgcataggcagagaggagcagctcagagcagttttgcagtcatatttatacccacttttgtttttgtttttgtttttgtttgagacagagtctcgctctgttgcccaggctgcagttcagtaggccatctcagctcactgcaacctctgcctcctgggttcaagtgattctcctgcctcagccacctgagtagctgggattacaggtgtgcaccaccacactcagctaatttttatatttttagtagagatggggttttgccacgttggccaggctagtcttggagtcctggcctcaagtgatccacctccctcggcctcccaaagggctgtgattacaggtgtgagccaccatgcccggccttatacctacttttaaaaacattcttctagggaaaggagagtaacttttgggtattcacgtcattgccatggaaaggggtattaactcccgggtgttgccatggcaatggtaaactgacatggcacactggtgggcatgtctgatgaaaagctgcttccacccaagctctgttttagcaagcacagattttggtccagtgtctgagccccacctctggagttgagtcccgcctcctacctcacacttccaggtcccaggctttgcaggaaccacagcagccccttagagctgtcagggagccagggccaaggccgcattgcccattctttgtcctgtgaatcctacatcctcactgcctgcacagatgtccccaaatccccactccagggtgagcgcaatacattccaacaccactgcctgctctcttctactcagagcttcacgaatcccagagtgtgaaatctttgcacaaaccaaacatggcactcggtaacattacatcctatacagtctctcttggttcttccaattacctcaaagaaaacatcttgatttggtgctgatgtgcctctcccacctctccaagcccagcttttcatcctttccaacaaagaaagagaagcccccaggcttactgcagaatatggcacctctgcttaagtttactgtttttatttttacagttaccttccttcccagcaagagatgctggtttcacatttactctggatgatttaagtgtttctttcaaataaaagttttttagtgaaaaaaaaatgggtttatttaaagaaagctatcagagatcagcaaactacagccctgaggccaactgcctatttttgtaaatcaagttttcctgggacaccgcagtgctgatctgtgtataaatcgtctctggctatggctgcctggcattatgacagcaaagcagggcacttgcaacagaggccatgtgtcccacaaagcccaaaatattcactctctggcacttgccagaaaatgtttggccaccccaggagcaaaggatcatcctggggaaagtggagacagtggcaggtgaatgatttaaattgagtaaatagggaaccctggttaggagcttggaccccagggtgagacagcacaaggtgaaccccaactcccctatagaccattgagtcccttctcgtggaggatcctaggctccctcatctgtaaagtgggagaacaggccccacatgaggctcttgtgcagactggtgagatactgcgtgcaaggcataggtctgtgcctgccgcaaggtagacagccagtaagtggccaccttgagtattaccagggcaggaggtgagaaaatccatttatcaccagctgagataagagttgcccagagaagaactattcagacttgagtagggatgtgaagttgaggtcaaaggcaggaggtagaaagggatggggttgctaagcaacacatccagatgctggaggtggcagaagtggccaagggaccagggcacagataaaattacccacctgtgttgctccaacgtcaccagtaaaatctgtccgtcacagctgccaggaacatggaatttgagaagactaataacaaggaaaggccaggactggtggctcatgcctatagagcttcaagaggccaaggtgggatgattgcttgaggccaggagttcaagaccagtgccaacaaaaagattgaaactctgtaaaatatttgaagagatttattctgagccaaatatgagtgaccatattaggggctcatgacacagccccaggagatcctagaacatgtgcccaaggtgttgggctatggcttggttttatatgtttaagggagacataagacatcaatcaatacaggtaagatatatattggtttggtcaggaaaggtgggacaactcgaagggtgcgaggggtggggcttccaggtcataggtggattcaaagattttctgattggcaattggttgaaagtgctaacttattacctaaagtcctggaatcaatagaagggagtgtctgggttaagataaggggttatggagaccaaggttttatcatacagatgaagcctccaggagcagccttcagagctctaatcaggcctaaaaaggtctcttttttagactcttagttaattctctcccaggtcaggaattaggcctggaaagggaaagagattctctacagaatgtagatttttcccaccagagacagctttgcagggccatttcaaaataggtccaattaatatattttagggtaaaatacttggatttctttcagaacctgctgtcattttgtgatgtgtcacaatgctacaaagagtcatttgtcagcctttaggtctctgccttaatgttaatgctggtcagctgtgcctcaattccaacaagaggaaggcataagccattcccatcgtgccctgcactctcgttccaggtttactttggaatgccctttgctgagaggagggatccattcacttggttgagggcctcagaattttattttttggtttacaccagtctgggcaacacagtgagaatctgtctctacaaaaaaaattttttaaaaattagcagggcatggtggcacacacctgtagtctcagctactcaggaggctgaagcgagaggatcgcttgagcccaggagttcaaggctgcagcaagctatgattgcaccactgcactccagcctgggtgacggcaagaccctgactctaaggaaacaaaaacaaaaaaaaaaaatacaaggaggagcccacaccatgcttggatgtgtcaaccttaaataatgagtttcagaaattatgactaactatagtgtttgagctcgaagcttgaggatgaccacccggaagcatagatccaatttgccctgaacatgcaagataattagccagagttacaagtgggtttttaaggaaaaaagaagaggcactttctaagttgttcaccaagaatttgcattaaaataacacagaccattgactggctacacattgttctttgtatcacaaactccaggaacatcaagataatcgggaaggcagctagtcatgactaaaacgcctttaaactcttgctcctgggcatggggccagaggggtgactgaagtttcatactcatgtctccctggacctgataccttctgcatacctaacatagctcagatttctctgggctattttttttcccaagatgaatggactcctgcagaaacaagacgggcagctacaagaaacaatgtggagagttaagagctcagcagaggccagaaacgagagctgggaggagcaggaaaaaatgtcagcttcatgctgcggaaatcttgaggatagctatggacatttggacagtctacatttgggattcaaacacccaggttatgatgagattctgtggtcctttcaagctggaattgttggtgacctgaacaaatttattgtgaaaataacaggaacaggtaagccagtcaggaccctcaggccatagatacacagacaggggatgtgtcctgcattccatgaacacaggggttctgacctcagctgttcatctctccacgaatctgctttttccttgagcttgtgtgagattacgcccgtatttgtcagtgttaccatcatttgacctggatatgccacaaaagccaaagactattatttggaacttgggtttggggtaaatatttaccttgttaccaaattcctccctttggtccccacttcttcctgagtcatgcctgaggcagtccctttctggaaccctccagttatctgcaccaataaatccttttttcccctcagactgtggggttgggttttccatcgttcagcaaatgaacaattcccaatttatagaaaccagagaaggtaggtacaattaccctcccaatgttactgaaccaaagctgggtctgctcacctggtgcagcaaagccaagcactgacactgaggtttgtagcaagagaaacaaggctttaaggtagggcaccagcaaggagaatcaggcagctgatgcttgagatgcaaacttcttaggggcttataaggaagggtttttaaaggcaggggtaagtttcaggaaaggagaagttgccagcaaaatcataaaccaatacatggatgttacatattggtctacctttaaaaaggcaggatattttggattgggggcttgaaggtcacaggtggattcagagattctttgatttgcaatggatttaaaaaacaaggtttgtctaaaatacttagggtcagctgaaaggaatgttaaggtttggcctataggtgtgactctctacaggcccctcaggaagagatttagaacaaaattgggggtcaggttcagtcccagttcccctttatctgaggtctgcatgaaaacagtcagcattttccatctggtggggtcctagctcctgaaaaacaactcactcaaggacatgggtcaagatgttctcttttactttctatagggaactgggatggttgagtgtcaacttgattggattaaaggatacaaagtattgtttctgggtgtgtctgtgagagtgttgccaaaggagattaacatttgagtcagtggactaggaaaggcagacccaccctcaatctggctgggtaccatctaatcagctgccagtgcagctagaatgtaagcaggcagaagaacacggaccgactaggcttgctgagtcttccagccttcatctttccgctggatgcttcctgcactcaaacatcagactccaagttcttcagcttttgcactcttggacttacaccaagagtttgccaacggctctagggccttcagccacagaccgaagtctgcaatgtcggcttccctgcttttgaggttttgggacttggactggcttccttgctcctcagcttgcagatgacctattgtgggacttcaccttgtgattgtgtgagtcaatactcattaataaattccctttcgtatatacatcaatcctatcagttctttccctctagggaaccctaatacaggaacctaacatcttgtgactctggcttacttgggtggcttttattattaccttcttgcttagcaggtgacatggtttggatctgtgtccctgtccaaatctcacgtggaattgtaatccccgatgttggaggtgaggcctgaagggaggcgactggatcatgggagcggtttctcatggatgggttaacagcatcctcttggtgctgctcgtgatagagctcgtgaaatccggttgtttaaaaatgtgtagcacccactcccccttctctttctcctgctcaaccatgtgaagtgcgggctccccctttgccttccgccatgattgtgagccccctaaggcctccccagaagcagatgctgccatgcttcctgtacagtctgtggaagcatgagccaactaaacctcctgtctttataaattgcccagtctcaggtatttctctacagcagtgcaagaatggactaatatagcaggttattcatttacttccctaattgctggctgcagaactagttaggtgcttggaatcttccttgaagggactcaaattttttcctttatctttatgtgggtgggtgttgcgggggggtgggggggagcctggcagacctctaaaaggggtccctgctccatctcacccgttatacagacaaagacactgagggtacttccaccttacaccctgccacgcctggattgcccacctctgttctctcccagccaaagcaaagagaaaaagagataatgctcacaccccattggccatgtttttgtcacaaggaggcctggaaaatgtagtctttattccaggaagccaggctccctgctaccaggaggaatgctgaggtcatccagcagtctctgccatagctgggtaacccccacctgtccctgtcccccatggggcaactttgagtgcaggacagaggacccacaagcctcacaccaacctggcaggacatcttcatcacatagcctggccaggtcatccccagaggaggacagcactggggtctgggcagaaccaaggctctggacaggccagaggggaaaggcgtaagcaatgaagggagcaatatccacaaaggccccacacctttcctgggtgctgctggcttcttcccacaccagacatctgagacagaggctgcggtgagaggatctcatggtcagtcactcttgcattggatgggaaactcccacctttgaatgaaatgctaattatagcctccatgtacagtctgttacctgctaaaaatacgctgtcttattctagtctctgcaggtgcagccgagttgggggaaataatgctgtttttagcatgagtacaaggagacaaccgaatcctagactcttggggacagcgtctgtctgtctgggaacttgtttccaggagtgtgaccgatgtgaagggccaggcagaggaagtgctgcaaccccaggggcacaacagagcagagctaactgtgggaggaagcgtcttccaggctcaggctcgcagtggaggcagcctcagcttccagggctgacagacattcgtcatctcggcaggagggagactgttaaaacaggcactgagggagtgcaatggggccccccaatccatccaagaaagcccgaaaacagggatgttggaatgagatggggaggagaaggtcccaaagacagtagaggaggcaggtatggggaaggattgagagatatcatttgttcattcatttattctacaaatatttattgagtcctactatgcaccaggcactctgctaagttctgggttaaagtgacagataaggtcgctgccctcatttattaaaatatatttcaacatatatggagtcaggaactgacctaggcactggagacacacagtaaagaaaaacccctccctcttggagcttgaattctaattagggagggagagtctgatgttcctttcccaagaacaaattgtatatgtccgttttcgctctgctgataaagacataccctagactgggtaatttaaacaagaaaaagggtctcatggacttccagttccacgtggctggggaggcctcacgatcatggcagagggcaaggaggagcaagtcacatattacatggatggcagcaggcaaagagagagagcttgtgcagggaaacttccatttttaaaaccatcaaagctcatgaaacccattcactatcacaggaagagtgcaggaaagacctgccccataattcagtcacctcccaccaggttcctcccacaacacatgggaattgtgggagttacaattcaagataagacttgggtggggacatagccaaaccatatcacaaaccaacaaggaaaggatgacaagagctggggacttccatgggaccctcccatccttgtccctgggtctccagttcagccttccaggtccaggaggtattggctttcccacctggccacatctgctgctcagtttctctcttgtgcccttcgaaggttcaaaccagcaccctcagccctgatattccccctcactctggggacatgaccacagggtccaagcaagccagacggcaggggaagcttcacctcacttccaccttccggatctagataagaggatccagttggcagagccaaattcacatacagacccaagttgcgtgagattttgggaaatgccatttttaacatccaggctctactcaggaagcaaagaaaggagggcagtggagcaggtggccaggccaggtgggactacccctgctactcaccacccaggctcgcccctccacccactcctgaacttccaaacacaacatttcctctgcctactcccgtgatcctgtgcaaaggacaacaccccctgcccagggaggccagagtccaccagtgctaagaaatgggccaagagtgggaggaacagccgtcttcctgccccaggaaactcgacattggctgcagcttgagaggggtccatggtgccagaggcccctgcatcccctgagactggctcctcctacccctgcagagatgccccagaccagagaaactggcccctgcccctatgtgcaatgacccctggggcatcacctgtgaatgagcccacaggaggaaggtcacagccagcactcaggctttagaagggtccgacctagaatcgatgacaccctaaatggagggtcagaagagggttcccccagttataaattcctcaaagcttcaaagagggccgtttccctgcaagctgagtattgaggctgctgctgggttctatatggtcagaagggggtacgctgctgtggagacagacatgctgtatagacatcacacccacaacctgcaaaagttcacacagcaggatgctgcacaaagtcaccaaatgcaaagttcacctggcatgaatattcaattgcctgctcctggaaatggtgtttctatctttatcgctcacgggcagaattgctgtggagtttctcatatcactgacattgacctctggtgggccagtcaggtgatagcctcagaaggctgctccagcccagctgggacggatccgtctccacagcacgggatgtttgcttgaattcgactaatacctactctcaggaaggaccatctttgctgtcagctctggttttatgatctcctgtgaaagggaagacatgtctccatccagggtcaaggctccaagcccttcattctcacccacaggtggatcccagtgtaacaggaagttgaacatcattccccactggagttggagacccagacaccccctgcagctccacaggtgcggggaaatcaggtgcctctgccttttcctggtggggtcagggactggagtctggaataagagagtgggaggtcaccgaggggaagatggcatctggggagaggaaacacctgggagaagctatttgcattttgtcatttcagaagccagatgttggaatgcaaagaaattctactcacagtaacacagtgagaacattttcacaaacagttttccacggatgtgaacaggttagaaccctgagctttctagagcacagcctccggaggcagattctctgggttcaaatcccagtccactgtttactagctgtgtgaccttgggcaggttacttaacctctctgtgcctgagtgtcctcatctgtaaactgaggataatgatagttcctgttacataggattattggacaagttaaggcaaacaatatcagcaaagtgctcagtgcaccatctgcctatgggaggcaagggtttaaaatgttaggcatcatcaccctcatttggttgcactgaatttcatgttgattattggctttatattattactgatgttttatattgattattggctttatattgattacttctgattattactgattggttttatattgagtattatatggcatctgataacattctcatgaccttcattcttcattcctggccctacagcatcatgtgtttttcatgctgggatcaattccattcccttcatccgacctttccctgcagaaacacagccagggaaaggagctctgaggttatcccccatctttaccacaatcagcagccacggatgtccctgagagcccagagcaggtgctggcccatcgtccctcagaaggtggcactctacgctctacagaacatgtgcttcccattccaccttccagcatctgctaatcctggatggctgcccagccttgccctggcctcccttcctgctcatgagcatccccttccccacacagcagttagaggaatccttctcatgctgaatcagctccaggcacctctctgaccacaaccctccagtgcccccatcacaggacagactgatcaggtcctgcctcctctcagttcccatctctgcccaggctcccctcacacttgccctcggtcactccagcctcactgcagtgtcctactctccacctcagcttgtcccaccttaggtccttctatcaagagtgaccgtccctgaatatgcccaccctcaactggctcctcctcgttacgaagatcaagcggcaccacctcaaaagccctcccgacaccccagtccaacatcagccaccccctcccatctgttaggtcactctcccctcctggaatgtaagtcccaagaggacagggatgctggcagtgctggccactgctgcatccccagcacccagcgcccaggacccagtaggtactcagtgacatttgtggggcacgtgatgaatcaaagtggcctgggactgcaggtgggagcagcgccccctcggcagcatggggggttgtaataataatgtcacctgtgtttacagcctgcttcacaacctgcagaacttaagcacccaccatccctgaaagagaaagataaacacaaatccagacgtttagccagaaaatgaagggaagacggaaaggtttaaaaatgagcgagagcatatgtttcttcctggcttcaagataaaagaggatacccagaggagaaaagcactcaaaaaacatgatgctttattcaaaaattagcccacagcagagtgtcagggaatctgtagtaacgaagactctgggataaattcttttaaattaagaagcagaaggagaaaaggcagcagccctgagcctcgactttggaatgtcctccatccatctgcatctgtcatcagctggcagagcgggtgcatggcagggggagccagggccaccattcctcccttcagccctttctgctctcagtttagggataaccaatgtttgatggcttgtctctcaagagtgattagaagcaaagctgcccattacaggctaaatatcaaagcgttcctacagaaatctcacttcctaagctcaaagccctgattctgggctgcctcttgacccaactcatctgggaccctgactggcaccagcagacgacaatgggctgacacacaccgtgcttactttagaccggggagtgcagttctgagctctccgggtgtgtgaacttacttaatcatcacctgaactcaacgatgctattgggattcagctcacagatgaacagagccaggctgggcagaatcaatgctccctgggcccatggctgcaggacagcagagccacttccaggacccccggccagcacaaggcccacaccactgaccactgacggtgctctgtgatggaagaggggcctcagcgacagccccagataccaatattgctccaagtgcctctttccaggaaacagtcctcttctgagacagtgaatccagcataacaggacagtgaacagacttttccagagctctcagaatcatggctgcagttctacagcttcaaagcgagtgtgcaaacatccacaagagtccctggcctccaccccaacaagagagagacattggaaaggtgattcctgggagggtgtgtgataagagtttggatattggacccctccaaatcccacgctgaagtggggtccccaaagttggagttggggcctaaagggaggtgtttgggtcatggggcagctgcctcatgaagagcttcataccctccccatggtaatggcttcttagtctatgagttcctgtgagaaatgactagttaaaaaagcctggcacccctctcctctcaccacgtgatctgcatacaccagctcccttcccatgccatgagtgcaagcagcctgaggcctcaccagaagcagacgctggcaccatgcttcctgtatagcctgtagaaccatgagccaaacaaacctctttatcaattacccagcttcaggtattcctttatagcagcataaatggactaagacagagtcttaaatcagtttgggctgctataacaaaatattattgaccaggtggcttaaacaacaaaaatttatgtcccacagctctagaggctgggaagcccaagatcgaggcaccagcaaattcaatgtctggtgtgggcctgcttcctggctcacttatggcaccttcttgctacatccttacagggcaaaaatgggagaacaagctcacattctcctttcctaagataacttcagtgttgtcaaggggttcacctcttcccatgcaacccctgtggcctaggatcctccactccagggtgattctgttcagtctgagcctgttcgcatacggcatatgcccctgctgattggtatttgcccagggctgggggcaggtatgccaaaataggccaaatacactaaaggaaaggacttgtagtgcatgctttgggggagtttttctcctgtctttacccaatgggcctgcacatactgccatgtggcctcacacgctggtggcagcggtcttgtgacgaggaggtgaaccaacctcagaacatagccaatagagtgagcagcaaagcggaggccaattaaccctggatctctgcggacatcgtaaagctgctgaatcaacctccccagaggtccagctcctggctggtctttgaactgggagataacaagttcccttaccatgttagagtcattagaggtttcagttacttgcaggcaaaaagcaagctaatcgacacagcatcttttccaaaaatccttctctgatccccccagcaaccagcaattccccccttctcggagcctcagggacttttctcaccagactaacccgctgtatcgtgtgtgccatttatgtcgtatcgcccccatgagccatgggcccaaggagaataagatctaagtcatttctctcctcctgagcccagggccttacacttaacaggggctttgtaaatgtcatggcacaaatgaaagaataatttagaagccaggtatctccactttagatttatgtaaagaaacacattactgttacttcaactgctctttcagactgtatggaagtatttttatgtcagtagagatgaatgttaagatgttttgttgtaataaactgcatgtccataaacgccctatccctcttttcccccagtcaacagcatctgaagactcagcaactttcttccagcaaatgatgtccctctttaaagttcacactctctttaacagatgtagaaattccaacaaacacatctggacaggtggttaccaagataactctccaaaataggtccaaaatgggactcggggccaccagtgagattttcaacaattcatccccccatgaactgtgagggccacccatccttatcacaaataaaccttgacatcccaggatacgacgcaggctgggccttgcaaagaggaaatacagactcccttgggtgacctcagaataggatttcaggaaggggagtggtggtcgtgctgtaaggtcagagtggacctgatcttacggaggctgtggaaaccaagagcaggaacccccaacatccagcttgggaccatggcacaccactgcacgtttctgaaatctcatctccccgaaagcctacccctctcaccatcttacttaccatagtgatgtaggccagggaagctccaaagtggagcttagcctgagagggttcttggctttgcccaggaaagaattcaagggcaagccagaggtagaagaaaacagctttattgtagcagcagtgttacagctgaagtattacagctctgtgactgcttctgcagagcggggctaccccataggcagagagtagcagctcaggacagttttgcagtcacattcatacccacctttaattgcacacaagttaaggggcagtttacgcagaaattttgggggaaggggtagtaacctttggatcaccgagtcattgccatggaaaggggcagtaactctcaggtgttatggcaacagtaagttgacatggcacactggtgggggtgtgtctgatagaaagctacttttgccctggccctgtttcagctagtccccaatttgatctggtgtctgagccctgcctctcgagttgagtcctgtctcctacctcaatagtaaacggcaactcagcccttccagtggtctagccacctctttcacctccaccatgaataccacagcccaggcatccatcacctcacaccagaccgcagcagtgcctcctctctcatctccccaactccactcctgttctccatgcagttcattcttcacacacagccagaggtactcgctaccaaatcctctgtccaaaacccctgggcatgtcccatctcatcagaacacaatccaaaattccgtatcgtgtagagtgaacgacttgtcccagctttctgaagactgccccagttgtatcactcaaagtcctgtgtcctggcaaacctcagtccaggcaaaccaggagggttggtcaccccaggatcacaacattcaaggcccccacataactcagaccatcctcccccttgctcactccactacagtggccacacaggcattcttgttcattctagaacatgccaggcacactcctaccacatggagggcctctgcaccggctgttccctccaactggagcatgcttcccccagatgtgcacctgaaagactcctttgattcctccaagcctgtgctcaaatggcacacttcagagaggacttccacgcccccatgatctaaagtaaagtaggccctagacacttgattgaaaagccctgctttattgcttgttttttatggcatctattactacctagaatagcacacatactcatatatgtatgtacatgtttgtgtggcatatgtgcatgcacatgtatgtctatgtgactgtatctgtggtggggcaggctgtgcctattgttcactgcccctgaactcccctggaacatcagctcccggaaaacggccctggtctgtttcatccacagctgcatcgctggtgcctagagcgtgcctgacacgtaggagctgctctgtaaagagcagatgaatgaatgaacggtacactcttctgaaagtgttgcctccatggagaactcagggagacagacacaagctgcctggcccagggtatctgaacccagcggctggactccttgtccagtgttccttcagggtaagagctaaggttgcatttgtgtttttcttctcagcccagaggacctttttgcaattttctggccatgggaaccatcgcagaagccagtcaccaagcttggcctcggtgaacatgctctcctagaacgagcctcagaccttcggatctgcccatctccaacaacccagttcctggacagtcaccccaggcagctcccctatccattaggacagagctagacaattagggtgtagagcttggtgaatcctgagggctcatctcaggccacccccgctctagtgaggaacctgcaggcagaggagggacatgactggccactgagagcgttgcaggcagagtcggcaagaccagctttctcccaccgcagagcactttctcgatggaagattctaggagtctttacccaattccattctctcacccttcttgcaagtcagcagggcagagacaggggcagcagagccccacttggcaaacaaagaagctgaggcacagccaaggtcagtgactcacctttcttcaaagagctaattactgtggggccccagcaagatggttacagtgtgggccctgagtcgtggcctgggctaggtcctggctctgccactttcaagctgagcaaattgctcacccctgtgtgcctcagtttctccatctatagaactggtaataagcgtaattgacctgtggcttttacgagcacaatgaaacccaggcatcaccaatgggaggagcccagccctggaggcagatgccagttccaccccacccgcccctccacccacaggctctgaggctcccccgacccctttgcagatggaaataatggcagcacctctggcacaaggcagttgtgagaactgatggtgatgtttcactggtttctttcaatgcttcttgttttgttttggaaaacaaccagagcagtgcctccacacagcaagcgcaatataagtatttgttaaataaaaatatggagaacacacgtatagtgcttaggccaatgtctgatgtaagtgatgcttttagtgacaaggaccagagcgtgagtcatcctgaccctcctgcttccctcccgtccatgataacccccaggccacatctcagactcacggggccacttgaatgccatttcttctcagaggtgaccttgctctctctgcttccatatgccactgcccacctcctccagacaccctgtctcccacacacacacacacactcacacacacatgctcacacacatcatgcacattcacacgtacagactcacacactcatactcactcattcaaatgtatacagttacacaccctcacacatgaacatagtcaaaaacacacacatacacactcacacagactcacacacatgaagcctctggggtacgtgcaaccaaagctctaaactaaggttctgaatcccagccaacattgcaagctccacactgggcctcctccaagcccccatccctgcccaaatacccagttcccgcactgccaggactcaccgacgcctcagcagagcgtggactgtccccttgatttaggcagcacctgccacctgataacagagcgtagcctgtgatggcattaaacacttcaaagatcaagttattatttataattatatatatgcttattttaacagtaactcatctacttaattggaatataaactggaaaataaaataatgttataaattcctgctaggcgctgttttcttctgaaggccctgagccagaggcctgttaaaaagaaagatcgcgttttggagaaatgttaaagacatagtgcgtgaacttgagacttccctcaaggaaggagagttaaaagaaaggggggtttgaagggccaccttcctcacgatgtgtctccgcgttacacagtgagtgtctgtgtgattttgctggagtgacgttccgtgtcatcctcgatcgtggaaaaccttctgccctacccacatcctcaaacacttcactgggctcaagcccccttacgcctgctgatgtctgcatctcttgcttgagggcttcttccagaacacaaggtggccattcttccagcacacacatgcgcgcacacacacacatacacacaaacatatgcacacacacacacacacacacacacagcaagctggaaatcacagggaataaaaaaacccaccactatcaccaccaccagcaacttccaaccaatgagtcctgagagttggagcataaataacccaggcctccggacctgcaggcggggcaactctgccctgtggctcatgctgtctgcagctctccgtaggatgaagctcccacggccctctgcagtagcccacttagtaacgcaccctctcacaacctcttggttctttgctttctgttgcatttcccctctttcccaacttctggtaaaggaataatttgcactcaaatccttgtctcgggaactcaaacaaatacatgtatacacatgttcacagcagcattactcacaataaccaaaaagtagaaacagcccaggcgtccatcagcagatgaacggagaaccaaactgtgatctatccacgggatgaaatgttattcagccctaaaaatgaatggggttctgatccatgctgcaacatggatgaaccttgaaaacacgatgctaagtccttgaaaggagccacacataaaagctcacatgatcccattcatgcaaaaggttcagaataggtaaaatccatagagacagaacgcagctcaggggctggaggatgggaaatgggagcaacgggtttgggtttcatggttataggtgatacaaaatattttgaaactagatagaggtggttgttgtacaacattgtgaatgtactaaatgccattttgttcactttaaatggttaattttaggccaggaaaggtggctcacacctgtaatgccagcactttgggaggccgaggcgggcagatcacttgaggttaggagttcaggaccagcctggccaacatggcaaaaccccatctctattaaaaatacaaaaattaaccagctgtggtggtgcatgcctgtaatctcagctactcggcaagctgaggcaggagaatggcttgaacccaggaggcggaggttgcagtgagccgagatggcaccactgcactccagcctgggcagaagagattctgtctcaaaaaaaaaaaaaaattaaaaaaaggttaattttaggttttgtgaatttcacctcgattttaaaaatttcttatctcagggtctgcttctggggggtccaaactaagttacctggcaccatgggcggcaacccatgcgagggactgcgccgcctctaatgataagatatggggagccaggagccctgcgtgacctccctcttctggggaggttcttggtctgatccactgctttttcctgagatcagaactttcaaatctaccttgtgaagtctagaaaagcacatcttttacagagtgggattaggaaactggtcataatctcactgtcctcaaaaagagcactttttcacaaacaggctgagaggtctccccagcttttctctctatgccctatgacagacctcagaccatgacattcagtccagaaaaatcctggaggcgtcttgactgttgagaaccaggagtagagtcagctcaggaaggggctgcctagagatttccactgggaggggcagctgctgtttatgaaatattttcatatggcattgattactgaaaaaatgaacaggaatggagttgatcagatttgcaattagagacgatcactctggctgctgctgtagagaaggaacttgagcaatgtcagcaaggacacataacactgatcaggaggtcattgcaaagactcaggcaggagatgatggcagcttagacaagggtagtggtggtgcagatggagggaccagatctgggagatacatgggaggtgaaatccacaggcctgggtaatggaccgtatggtgggaattagcaagcagacaggtgaaggtaccattgtctgagaagacaagcataggaggggagcaggcaaaggaccggggtgggagatcctggcttcattcttagatgcgcttagttttgggtgcctttgaaacatcctggtggagattccaggaagccaggtaggtacagggttctggaactcagaggagaggcatgagctatagagaccaccagcctggagatggtaaaggaaggaagagaatctttaattacagaccaggaaacaaaggcatagaacaggaaagagatctaacaaggttcacagtctcagtggcctagcagcacaatatcgtcagtgtggtgggctcagtaacaaccctccaaaggtctccacatcctaatccctggaacatgtcaattgtcattgtggagggctcagtaatgaccctccaaagatgtccacatcctaatccccggaacttgccaagatgttaccttacttgctagaagggggctctgcagatgtgattaaattaagcatcttgagctggggagattatcccggattcaggataatccaggtgggttcaacgtaatcacaaggggttctgttagaggagaagacgatgtggtgagagaagcagagattggcgcaatgaagacaaggaaggcagcccctggaagctggaagagataaggagcacattctccacggagatccaggaggagccactgctgacacctcgatgtgagccccataaaactcatttctgacttctgacctccagagctgtaagagtgtcaatatgtgttcttttagaccactaagtttgtagcaattagttacagcagccacagaaagctaatacagctgaactcacattattattgaccacataaacctggatccttgggggactctttgactgtaagtaacaatactgtgaggacatttcctgctgacttaacaagaggtcttggggctgattcagccactcagactctccctccttttgctcagccttcaggttggtaacgtctctgcccacaatcatagtatggccgccataactccagcatcagcacctcacgggacaatgtctaagcaggatgaagggcacagaagtcaggggcctccagatgctcaagacctctggatttaatgaagagaacaatgattcctgcaaagcccagaacacttccttttacatctcattggccagaattgatcataggctcactctgggactgcagagtgttggttcctcccccttgagggacaggttcctgcctgaggggagagtataacattctactctgagctctcttccaggttcccaggtcctgagagattaacccactccctccaaattgcttctttgtgtcaagattctgacaataggacatgagggacacagactggacaagtcacaaagaaagctcctttctgcaagattgcaacacctgcctcatcagagcctccagacttgtggctagcactctgcccattttggttccttctcctctgagccctcttgttccccaggttttgggagacacttccttaggggagtggcaacagccattccttggcagtgtcaatctcactgagagtttttgaaagttcatcatgtgcaccgaaaaaaaaaagcagaattctattaacaagagagactagatattgggtaagcaactagtagtcgctgccacaaactctttgtatgcttacttggggtagcctaccaggcttaacccagttctcagccaggggcgactgtatgtcataggaacatgtggcagtatttggagacatatttggagtcatatcatgggggatgtttctactggcatctagtgggtagagagaggccagggacgctgtcaagcattctacaatgcacatgacagccccacaatgaagaatgatccgattgcaaatgtcaacagtgctgaggttaagaaactctgacctaatcccttgggagcaggataggggtgccaggtttaccaagaggtgtattcatattttttttggtgcgggggagacggaatctcgctctgtcatccagactggagtgcatggcgcgatcttggctcgctgcaaattccacctcctgggttcaagtgattctcctgcctcagcctcccgagcagctgggattacaggcacccgccaccatgcccggctaattttttgtattttagtagagacggggtttcaccgtgttgcccaggctggtctcaaactcctgagctcaggcaatctgcccacctctgcttcccaaagtgctaggattacaagtgtgagccactgcgcctggcctgtacttgtatttatactaaaatactattccttgtttatttgaaattcacacttaactgggtgtcctgtgtttgatctggcaaccctagaacagggtcagactctataccccagtgtttgctgtcgcccagggcttaacaacctaacacacatttgtcaaatgaatgaaaaaatgaggatctcaccaaagatgtccaaggctgctgcacaatccggtcaccttggtcaaaataccttcctggagcccatgcagatagcctccaaaacacaaagcagccatctgcttcctgggctccatgacggcagcagatcccctgcaaagcagctcggatatcttccctttccctccccttcctccagggaaggttggctgcctgctctgcagtgacactgcagggtcagaactcagcctgtgagtaatccaagaacagtgcctatttgaggggttcctcgctgctgagacagacagcctgtggccatcagtcccaaatagcatctgttaatggcccactggagtatggtccctgtcgaagtcaaagaaaaaagcccttaattcactaatcgtctaaacagacaacaccagctgataactcctatagcccagcttatgattctttatgaatctcagtgaatgcagctgcaaacagactataaaatttgttttatccacaggggaaccctttagagggctgatggtggaaactggattcatgaggacccactgccctggattttcatagtcaagttttgcaggcaatggaagaacatcccagggcctcatatgacagcacgtttctgattccatgaatactcattgtgcaccgccctaaaccagacaccgagtatgcattttaccttcattaatcttaatccacatgacagcttgcagtgtccttgatagtaaccccattcttaagatgaggaaactgaggcccagggaggtcagctaaggaggaaggaggggccagccagtggaggcagagcccaggttagttagaacattggccttggggctgtactgctcttttattaaatcaccaccataatatatcagctcataagtgatttttctggacggggattgcaaaaccaggtgtgctatcttagagagagccctaaactgaattgcatttatggtcaaatagatcctgcttccccctttcaagaacttttgtccaccaaagatccatgagctctaccttttccgcagagatctggagctgtgctgcctggggacaccttattttaatattcacttacatgtgattaatgctgcttaacaaaggcctgtgtgcctcagtttcatcacacagtgaaatctacaagtttaatcttccttgcctgcttatccaaaaaagaactatgggtggatggttaagcagctagacaaactgtcactgctctctgcaaattttcctcctaattggaggcagccctgctgtctttcactggtaagaattctgattaaacctcattgctttccaaggttaaacgcatgccaccccaggagaccacagttacaccgtttagaatccacccccaaactaaccctttattcctgaatgtgcactttgaggccttgggcattagtataaactacactacacaattatttgtaattaagggagaaaatgtgtactgtgctacaaaaattagccgtgctttgttgatgtgaatcatgtctatgccggcgtgccagcccagagaggcggcataaaatacaattaaatttcttctgacttaatagttgtttatgttgctatttttcataatcataatatctcaagacacagaaacagtttctctctaatgtaattgcgttctaccaatgagacagcctgggtttaaatgaaaactcaggcagaattaaccacaagagtgtattgtatggatgatgctagaattttgttataaagccccatgcacaactgtccccactcaggagcttagacctttatcccaatcccatgagggtgactctgcagcctcttctgctctcgtggaagagtttgagccaaatttcgtgagctattaaagccacctgtgccccagtttagtgtccttgtgctccagaccccagtcatttccctacttttaacatttctcctttacacattgatttggttgacacatattaaaagcctgacttttacaaccctcataaaatcccatctgctccaagctccaatccaaactcagccagaacatgctcagacaaactgttcggattatacttcagcctctcaatggaaggacacacaaagcaagagcaattctctctctctttgtcattaaacgtaagtcaggcattcttcacaaaatgctgccaagaaagccatagaaggaatagcatgacttatacacatcaaaagaaagatcccctcaagggggtttgggaagagtcggggtggcatgaagagcttgaaaggcccaattgtccatccaggatgataccagtgagagatgtcatgaggggcgagagacatgggaggggaaaggctgtgccagacactgtggatggaggcagcaggggctggagcatcaggaggctgtgggggccccaaggattctgctgagccccacccaggcccagctgagtcatggctgagagatttcccacgccagggacatctgagaccctgaggcccctaagtctcccaggcagacaccgagctccagaatgcggccaacagtccccacctgcatggaaggacctggaaaacaggctgaggccttgaacccagaggaccaagtagtttgctgggaattatggggaagaaaggtggctgaaggagctttgcagactccctgagctcatgggtgtctgagctggtaagttaagatcagcctaaaacacctgacctacagcacctgcctacaatgaacacacacacacacacacacacacacacacacgcacacacttacagaggcactcacaggcaaacacacatgcatacacacgcacacacagaggcactcacaggcaaacacacatgcatacacacacacgcacagacttacagcgggactcacaggcaaacacacacatgcatacatatacacacacacacacacacacacacacacacacacacacacacacacacagtcacaaacaagatttgtcccctctcccctaaaggagaaggggcaaaatgcagacatcaccacacgggacctttgaacagtgacaatggaaagaaaacccaagtaaacaagtgataccaccagcccagccacagccccctcttctatgctaaattcaatttgccacgtccccttcatggtgtttccttgatggcaggaaagggatagagtagaaaattataggcagggcccagtgtggggaagagaggcctcaaaaactcaaggcccgagggaaggcaatatgcggtgacacagtggtttccaaaactatttttcctctctacatacacacaaccagattcaccagattcagcacacaaaaaaatgtatttcagaaaagcaaagaataattttttatgtaagtatgcaccaaatatcacataggacatggttatactaaaaaattaatttatcaaaaattcagatttaaccaagaatcctgtattttatttggcaacacacacacacacacactctcacacatcttatctaggactcaacataaaaagcagctaaaaagcaggtcctacccctgggcctccctgccccagcccctagaccctgatggcactttcttggactctaagggcccaattagaaaatcactggtgcagttgggcatggtggcttatgcctgtaatcccagtactttaggaggccgaggtgggtggatcacctgaggttaggagttcgagactagcctggccaacatagtgaaagtccatctctagatatacaaaaattagctgggtgtggtggtgcacgcctgtaattccagctattctggaggctgaggcaggagaatcgcttgaacccaggagccggaggttgcagtgagctgagatcacaccactacactccagactgggcaacaagagcaaaactccgtctcaaaaaaaaaaaaaagcaccagcgcggtggaaagggtatgcgttccacgtcaaggtacagttccacctggttcaaaccccacttgccagcctcgtgaccttgagcaagaccctttacgtctttgagcattaatttttccataaacttaggtttatgtttgaatctgggtatttgctcatgtgtgtgttggaacactgccctctcgcccctcttgtcacccgtctctttcccaccaggctccctgtcactggggaagagaagaggaggctgctctaaagcaggttctcagtggagacagagagcagggagacagactttccctagaggacacccccagatttgttcaccttgtagcgaactgtgaaagggatttcttactgcatctccatctcctgttacagagccaccagagtgttctaattaacttaaagtcattaatggctgggcacagtggctcatgcctgtaatctcagaacttgaggggccaaggtgggcagatcacttgagatcagaagttcaagaccagcctggacaacatggtgaaaccctctctctactaaaaataagaaaattagcagggcactgtggcgggcacctgtaatcccagctgccgggaggcagaggttacaatgagcagagatcgtgccactgcactccagcctgggcaacagaatgagactctgtatccaaaaaaaaaaagtcattcattaaatatagaaacggggtggagaggacagactgaagacccctggcctcttgcttgtgcagcatcgaggaggagagaaaactcaaggcagcccacaaggtgtcctcataagcaactttagtgtcctcataagcaactcaaagagtaatggtgctgggctaggctggtggcacataggacatttgttcatgaagacccttcctgccctgggccaagtttaagtacacaccatggcttagaaggtgggtgtgaggttcaggctttggtgatacttgctggcttgtttttttgggggttttttgggttttttaaatatattacttcccctgaagcattaataacatgctaagtttccaaacttatcagctgagtgatgagttgactataaaacgccgggttggagagtgacaatatgcccctgggtgtgcgtgcacgcccgtgtgtccaaatgaacctacgtgtgtctgttgcccagaatatggctcctatgcaatgatcttgaacacctggttaatgtatttataaaggcaatacaatcatacagagaacaccgctggcatttggcgctcattcccctttgattgagggatgatttttctctccactgttctggaattggtgaagtgttgagacctgcatcacagagatggttctagtctcctgatttaggctgtatggggaatattcccagcccatcctgtcccataatagagactaccagttcttagacatcatctccctcagaagcagggaattctctccacccagagactgcttcatctgcagctcttcatgctcgcttatgattttgaaacccacatcttatgactttgagtctgcgttgcccagtggtcctggcctctgacccatagcttcatcttatgaaaatcctagcccccagttttgtacacctgggccctgatggagacttagataatttctatcccaaccccaggatcgttttgcgcagctttcttatgtggattgatggacaggtccatccctgggtaccataaccactacccaagaagtgtctgaccaagtggaagccaagcgtgttaagggaagaaagttgccaacagcccttctcactggctcccattcagggcctcaggagtgacgtgacccaccccaggggctggaggagagaagctttttggctaaaagtttgagaaaactgtttacacagaagtcccgaagagattcatgctctggtgaaaatcagatgatccaaaaaattgtgtgtgacctgctgtagagatggacagtagccaggagacaccacgcttctgaatgcagatcatctggctctttctgaaaaagggaacccttgatgggctgggattcttagtgacttggagtgctgactatttgaatgtgaatcaggatttgttcagctgcaaggagtagagtaaattaacagttgcttagtcagtgcttctgaaactttcgtgtgcatacaaatcacctgggttccttgttaaacagcagcttctaattcattgggcatggaatggcatctataataagctcttaagtaaagtccacgcttctagtccagggaccataatttgagtagcagaggggtgtacactgcaactaccagggagcttccaacttaattggaatcctccagaattccaatttaattggtatggggtgtggtctgggaattggcaaattttaaatccccccaggtgcttctagtgcacagctaagacaagaaccactgacttaagcaatagagacttttccttaccgcacggtacaagaagtccagaaggccgcgttttccaggctggtttggcagcactatcgtgtccggaattggtgggttcttggtctcactgacttcaagaatgaagccgcggaccctctcggggagtgttacagcttttaaggcggtgcgtctggagttgttcgttctctcccggtgggttcgtggtctcgctggcttcagaagtgaagctgcagaccttcgtcgtgagtgttacagcccataaaagcagtgtggacccaaaaagtaagcagcagcaagttattgcaaagagcaaaagaacaaacctcccacagaacggcaaggggacccaaatgaattgccactgctaggtctggcagcctgcttttattctcttatctggccccgcccacatgctgctgattggtccattttacagagagccgattggtctgttttacagagagctgattggtccattttgacagggtgctgattggtgccatttacaatccctgagctagacgtaaaagttctccacctcccccctagattagctagatacagagtgtccacacagaggttctccaagtccccagcagagtagctagaaacagagcgtcaattggtgcattcacaaaccctgagctagacacagggtgctgattggtgtgtttacaaaccttgagctagatacagagtgctgattggtgtatttacaatcccttagctagacataaaggttctccaagtccccaccaaactcaggagcccagttggcttcacccagtggatcccatactggggccgcaggtggagctgcctgccagtcccgtgctatgcacctgcactcctcagcccttgggtggttgatggcactgggtgccgtggagcagggggcagcactcgtctgggaggctggggccgcgcaggaacccaccgcggagggtaggctcaggtatggcgggctgtgggtcccgagccctgccccgcagggaggcagctaaggcccggcaagaagtcgagcacagcagctgctggcccaggtggtaagcccctcactgcctggggcttgcaggccggccagccgctccgagtgcgggccccctgagcccacgcccacccggaactcacgctggccggcaagcgccgtgtgcagccccggttcccgcctgcgcctctccctccacacctccctgcaagctgagggagccggctccggccttggccagcccagaaaggggctcccacggtgcagaggtgggctgaagggctcctcaagcgcggccagagtgggcgccaaggcccaggaggcaccgagagcaagcaagggctgcagggctgccaacatgctgtcacctctcactatggtggaattaggagccagaatctttccatccttgtgttccaccatccttatcatgtcttcaaccttaatgcctcacggtctcaagatggctgcagagttccagacatcatatccacccacagggtaggaagaaatggcaggacactttgctgtctctctcttcagcaggaactttcatggaactcagcccctccacccacacaacagacatcactttgtctttttgccaggtgtgggttatatatgtggttgccatattcagcaaataaacgtactaaatttaaattgggacaagtttatgctaaacaattattcattgtttttctggaaggtgaatgtaactaggcatcctgtgcttcctctggccctagtaatatttaatacatccacccatataccaataattgacaaagggaactaggatgattacacttggtttagcctccagcccaccctctaattaacccgtccctttatccttagctgagcctgagttcctctctcttattggccagacctgggtcacatgtttgtctctgagccaatcgctggctagagaaatgggatgtgctgactggcttagcctgggtcacatgctccatcctacagccaaacatgtaaggtggataagggagaaggcgttacctcccttatcgaggcgaaaggctgtaactaggaggagggtgcactaaccacgtgttttattttctgtattccgacactttggtatctgggaccatgctgaccctgacctgcctttctgagggttagccaattcttgataaagcatgcttttcaaatacaaaccaaccaacccagagccaatgctccaaccccctcctttattggaccctcctattccattccctagtcacgccagggccaggtgccagacagctaggggcagtccctatgccccagggccccctgaaattattgaaactaactagccaatcccaaaacctgcttacctcgccttcctcatttcgtccctccaaagccacaatcaaggctctttcccacattcactccctctccttcttcctctgccaaccccagcgcttccctgggtggtccccatggtatggtgtgtcccctcctgtcgggacctgtaacaaaccctcttttgagtggcagtcctttcctgacttattatacctcgaattttccatcaatccagtgtactttaaaacagagggaaagcattttttcaaataaatgtattcaagcatctactagtacgccagacattgcttcagtgatgggatacagccatgaacgaagcccatacaatgctcctgaaacagacattctagtgaagtaagataaataagcacatgcaaaatatgtgtcatgtcagatagtggtgggtgttggcaaggaggacagagaacgggcaggaatcgtaagaggctgcaatttcaaatggagcaggcaaggagggccttactgagaaggtgacatttgaagagagagctgaggtagctgagggaggaagccacaaagacatctggtgaaagagccatccaggcacagagcacagcaagtgcaaaggccctgaggtcaggagggattttaactggcttcccctggatgttgggtggagaaacgtgattggcacagacagtcatcagcccttatccacggggggctgaagcaggtgggataaagccagaaagaggggcgctgtggactctgtgctcgttgccctggcactcgtgctggtgccttgagagcactcccaggcagtaatgatccctctgtgggtttctccggggtcagctggggtttctgctctgtggacagcagctggagggaaacaggagtgaatcagtccatcaaatggagtcatggatggaccagtgtctgaagataacgctgtcttcttctgtgctggggctacggttctccccagatgctgaagaaatcattgaaaggacatgaaacaaatagatatattataaagcaagaatagtaaaatgttaatggtggagtctaggtggtgagtataaggtgttcactgtaaaattttttgtttaaaaacgtttaaaataaaatattggggtaagtgacacacagtccttttgtttttttaattccttttaagtaaaaggttgacagtgggcgagctgagagtgtctctgatatcctagttgacctgaccctgtttacggcatggaaacccttcagtcctcatttgcacatttcatggtcacaccaatgggctccttctttttgtcctgtgtcttctcacagaccttggcaaaacaaacacaacagtagtgatgccaaccatttggatatgccaaagggaagccataaagggcttcctttaagccttaagagatgaaagtttttaaattaagaaataaaaattgtatgctgaggttgctaagatcttcagtaagaataaatcttctatccttgaaattgagaaggaaaaagaaactcatgctagttttgctgctgcacctcaaactgcaaaagatatggccacagtgcacaagtgcttagttaagatggaaaaaaccattaaatttgtggatgggagacatgaacagaaacgtgttcagtcaggttctgtattagctgtggtttcagggtccactgggagtcctggaatgtatcccctggtggataagggctgatgattgtctgtgccaatcacatttctccacccaacactctggggaagccagttaaaatcccacctgaccccagggcctttgcacttgctgtaccagctgctgcccacagagcagaaacccagctgaccccagagaaacctgcagagggatcattaccgcctgggagcactctcaagggaccagcacgagcgccaggccaccgaggacagagtccacagcacccctcttcctggaaagcccacctgcttcagggccccagacacaggctgcagctcccagacccccttaacttcacatcagagaccccagagccagaaaggcctttgaaggaaaggccttcttttagacccatttttgtatttgtttttgacaaatgaggaaacagaggcacaagactcagagaatccagcttcttccactcacatcacaagctgcgtctgcccagagtcgccatgcctagcctcgggttcctggtgcaagacgacacacatagacacagaatgggattcgagttggattcacaaggaaaagggtttcccccaaagcctaaagacgaagaaagggtcagaccaaatcatgtttccacccagtatcttttgagtactccctatgtcgggcactattctacagcctagggctacagtaatgaagacagacacaattccttccctcaggaagtggaggtgatgatgttagcaaatgaatacatgcagtcatttcaaagagaaataaattataagaagagaacaaagggaggcaatgggccagacagcaagggtggtagtggggctactttagatggacaaactggggagactgtccaaggccatggtgaggagcttggattacattcccataaaatgaaaatgggttagggggcttagatggggaagggacatgaccagacatgtattctaacaccatccttctggctgagtgtggagaacagattgtcaagggtgagggtggaagcagagagaccatcctctctgggtggaagcgaagccactgtaattgtcaggcaggagctggtgatgcttggactggagtgcatagtgcagatagtgaaacgccgtcagaccctgtacgtatctgggggactggaggtggggttgaggcaaagagaagaggaaaaacaacacctgcattttaagctgagccactaggttgatgattgagccccagctcttctctcctgggagcgataaacatttgctataagatctgtgattcaaataagcttaatattaagctcagattataactttgtgtcagcgactcttgatgaaaaccaagaaaatatcctggcataagaaagtctgatggggacacaggagagcagcacaaaggaaaccatggaagcctcaacatagacgtattattttttctcgccattataaaggtggagcaactagggcacagaaaggttaagaaacttgctccaggtcacacagccagaaagcagtaaagccaatatttaaacctagtgccatgtttttatttacttatttttaattttttttttaagacaaggtctcacttggtcacccaagcttgagtgcagtagcgtgatcacagctcactgcagcctcaacctcttgagcctcaacctcctgagctcgagcaatcctcccacctcagcttcccaagtagctgggactacaggagagtgccaccacacccagctaatttttttttttattattatactttaagttctagggtacatgtgcacaacatgcaggtttgttacataggtatacatgtaccatgttggtgtgctgcacccattaactggtcatttacattaggtgtttctcttaatgttatccctcccccaaccccacaacaggccctgggtgtgtgatgtcccccgccctgtgtccaagtgttctcattgttcaatttttgtattttttgtagagacgagggtctccctaagttgcccaggctgatcttgaactcctgggctcaagtgatcctcccatcttggcctcccaaagttctgggattacaggtgtgagccaccatgcccagccatagagccacgttttttaatcactgcactattgaaccagtcttcaggtagaggatattgaattgttccaatttgaaagtttatttttaattgtaatacacagtgtgactgggaatgtctttatatattcatctttgcctccttgagcaagtatttctgaagataaactctctagggagtggagacagcggtcttagggtccctcatgttctgtggagtctgtcagcttccacctggcagccctccactctcacatctttgcccgaaagtcctcctttctacgaatgagccagggccccctgcccaactgttgaactggccttggaaggtggccaagctccttccaggaggtgaggggtggggggagaatgcgtcttctgaacctctaaatagacccaggtcaacaaggctcatcccctaaagtccaacacattatctcatggccggcttcagccagcaagcaggcggcctcctgaaaaatttatcatttgctattttctgctcatccatgcaggagttctgacagtcctcagggccagagacttctccactgagataatcccagcattccatccagttccggggcagagaacagccgtccatcctcattagggtccggttaggaggatgaagccggacacgcaagatgaggggctcattctgtttcctattttgggggttgagtgtgcaggtttttactgagaatggcttttcctttccctacgtgaagtggtcactcctccctgagctgcctcttggaagtatcgaaagctcagcggaactggttttgtgagcttactgatcagaaagtgctcgaaagtgtcatcaaagtttcaaatccattaggaaaatctgtttgggtgatgttcaaagacctttaggcttttgtcaccaggaggctaagaaagaagagaaaagtttagaagctgagaccttgtttgtgtggtttcctttggtcaaggaggccatggcagttgtgggtcctgccagggtgttactggcttaattcaattcagacgacctttgatgagcctctttaggtgccagggctcagccaggcactggggcaccctgatgagtgtggtctctgacttggggagcaaattgtctagctcaggtccccgaaaaacagccgtctgcctacagtctcatgattttgcaacatctctgtgacatctgggaagaagagtgattgctgaagcacagggctgcgctgtgagcccattcctgagggtgccaactaactcagccacaggcaagagtgtgtctacaactcccagagcccccaggggaagcaggagtccctcaggagaacaggacaaagaccatatgaggctcccagctcagttccccgcttgactctgcttctggacaattttcaaacctgagacaagacagacatgttccctcttggatccaatttccatatagttaggaatgtggaccaaggaattgcaaagggcacaccttggcctggggtttccaggtgcttttcttctttctacaaccccccaagtgatctttattacataaataataaactgtcatttttaaaactcaaagaacacgaagcaaaagtagttcctcatttcccagttttcacactcatcaccccaggccagtatcctattcaacgtgatgtgtgtcctctaagaatacacaaacacacacacacaaacacacatgggttttggggccaaggcaaagagcaacagggtgctctctagagggtgactccagagagggcctctcggacgaggtgacatctgcagagcctggagtgagaggacaagccaggcagatatctggggaagagcagccttggcagagggacctgcaagtgcaaaggccctgaggcaggagggttctcaagggggttggggagcagcacagaggcccatgtggctgcagcaggggagtgaggtggggagtggcaggggcggaggttgaagagaggatgaggggtcaggccatggagggccttgcaggccatgaggaatattttggcttttattctgcatgagagggtgggtccctagaggactctgagtgatggaatctgatgagctgacctaataggatgaaaggcccaccctggctgctgaatggagaacacaaggcagtggccggaggcggagccaggaacccaactaggagacttggacactagtccaggcaagagatgacaatggtgagatacagacaagtcaagatcctggcttgactgactccagcttcattcttctccctgtctcaccctccctccctctaccttcccaaagagttcccgacctcacgtactctggctatatctatcatttaaaaacatagccatgttagtcatctgtcacaccctgtgctcctgtgtcacccaagtcaggtgtcccaggaacaggtctggagagggtgctgtgggcatctgctactcagacttctcttgggtagaagtctccagactggcaaattaggtctaaaccttcaaagtatctgggaaatgccaagtccccccaaaacagtggtggtttggacctggtcctttacaatgctgagtgaactcatcatttccaaaaatgagtggccgcgagcagtgacgctagagcaggtgagataatattacatgccatgtgataaaggccctcttttatgtgacaaaggccctcttttacattctgtatttatttcaatatatattactaggttggtgcaaaagtaattatggtttttgccactgaaggtaacgacaaaaaccgcaatgactttagcaccaaccttattttaaaaaaaaatagaaaacaaggatatgagatccatgatgactcagccataattccatgggctgaggttgaatttagaaaagcgagtccatttcaagagaaataatccatagtcgtacagggcgtgccctgagatggcctgagcagcactcatgagggggtgtgcaaatggaagacattgagaaacggggagttcctgccaagctgggtggtttgggcccgggtatttaatttcctttggtcaaggcgagcagaggatcttccagcccatcagagtcacagaaagaggtgtcagggtgaccttacccccggcccagagcgggtgggaaggtttagtcatggaaagaaattggatctgtttttctccacatgtccccggggttaatctggagaaaacaagttttggttggctggcccagcttcgcttaaaatatttaaaactggcttcttttgcccttcacagcaatatctcccaggttcttacctcccatctgagctgtctgtctgcattagggctgagttgccgaaggagcatagatcctgtttttgtgtaaaagatgctgatttatagaacctctttattatggctgttttaatgaagcaggttactgtccccaaggggagacttaacttgtaatgccgctaatgcatagatgctgctgtcattgaaaagaattgttaaaattgtactttaatagtgagttgatataaatcttcaatggcttatttggacaggggtgaatgcacccaacaagtagatgtgtaagggagctacagacacgagctcccaccagcgaatcgcctctgaagttagtgccatggaaacacaagcactcaagacagtggttttatccccggtaaaaataagacaccattccggccaggcacagtggctcacatgtgtaatcccagcactttgggaggccgaggcaggcagatcatgaggtcaggagatggagaccagcctggccaacatggtgaaaccctgtccctactaaaaatacaaaaattagctgggcatggtggcaggtgcctgtagtcccagctacttgggaggctgaggcaggagaattgcctgaactcaggagacagaggttacagtgagccgagatcgtgccactgcactctagcctggcaacagagtgagactccatctcaaaaaaaaaaaaaaaaaaaaaaaggcaccattccacagtctgcttgctttttgccaacacagcattcagggctgctgactacagcaggtgaattatgcacaaggtgacagcttcccctgcattctcggagaagagtctggcaggtcgggtaaactgccaggctttgctccttttgcttctaaggcagaatctgcagacccagagaagacaagttctcatcaccaactgcctcatcctggtttgaagacaggttctcatcaccaactgcctcatcctggtttgagaagagcgggcaaaggattgattctgcttggactggtctggattcacgcattcaacaaatatttgcaccttctacgtgccaggcactgtacttcatcaagacaccaaagggcttttggcgtagaaataacatgaactacaataccccgtggctgcaggctgctccctgggagatggaggggtagggtggagatggtgaggtggctctggctagttggtgtgactgctgcctcctccagccagtttctgatttttagctcacttttagtgagctcacatggcacccccagagggtgaagtgtggttctaagccatattttcttccctttttttttttttttttttaagactgagtctcactcactttgtcacctaggctggagtccagggcatgatcttggctccgtgcaaccactgcctcccgggttcaagtgattctcttgcctcagcctccccagtacctgggattacaggcatttgccatcacacctggctaatttttgtatttttagtagagatggggtttcaccatgttggtcaggctggtctcgaacttctaacctcaggtgatccacccacctcagtctcccaaagtgctgggattacaggcatgagccaccatgcccggccctaagccatctgtttaaagcatgttatttaatctttacaactccatgtggtgcatagtattactaaccccatttcattgacaaggaaactgagtcacgtagagttaagaaattcaacccagtgcataaatgaaacagccagaatttgaaccatagtttgttgaacttcacagtctctgttttaatcactctgccatcccctcctccagggagctgccatggctgaagtcagataatcagccctaaaattcaatatttggaacttggcagggtgtttccagtcctagatgacagaaacgaggcaggggctggttgctaagcaacctactggttggcagtggtgactcctgggagtggggaggggtcaatagtggacccaggttatcatgggatcaagatctgaccaatcagagcatcccatttccccagctgtggtgattggctctcagggttgtgcatgtgaaccaagtcactccaaaagcagctggaccaaggacttttcatctctgttgggaaagaggtgcctgccatctgctggggtggctgagctgggatattaatccagagctgctgagggattgtccctgttgctcctaggggaaaatctgccttagagtatagccaccatggagataatatgagagtccagaaaacagtgtcagcatcaggattgagctgagctttatatgagccaataagttccctttcagcaagttgggcctcccaccacttgtagttacaagtaacctctagctactgtagggcaaagactagtgccccatttgacaggtgatacaactaaggctccaagcagaagacaggaaaaggggaggagccaacgttaatcatctagtacttgccattcactgtctatattgctttatttaatgcgactaagctgggttgcaagctttagtgtgacactgactgtgatggttgactttatgtgtcaacttgactggaccaagggatgcccagatgtctaacatgatttctgggggtgtctgtgagggtgcttctcagaaggatgagcatttgaatctgcacactgagaaaaatggatgggcctccgcagtactggtaggcatcctccaatcccttgaggacctgaatagaacaaaaaggcagaggagggctgggtatggtggcttatgcgtgtaatcccagcactttgggaggccaaggtgggaagatcacttgagcccaggagttcaaaaccagcctgggcaacatggtgagatccccctctctacaaaaaaaaaattaaaaataaattagccaggcatgttgtcacgtacctatagttccagctactcaggaggttgaagtgagaggatcacttgagcccaggagttcaaggctgtagtgagctatgatcttgccactgcacttcagccggggtgacagagcaaaaccctagaagaaagaaagaaagagaaatagaggaagggaaggaaggagggagggagggaaggaggaaagaaggaaggaaggaaggaaagaaggaaggaagggagggagggagtgaaggagggagggagggagcagaggggaggaggggagggagggagggaggcccaaggtctgaaagccagtgcttccaagggtaaccctttccccttgacccttgctcttgcccccacagtgtaggaagttgaactttattctgctgacatatctgtgtttgagcttccagacaaacttcatatctgcaactgcgacagttctgtcccaggcaggatcccagcaggaggcagatagcagatctgcagagggaaactgaggagtgtacaatggagggagtgtttacaaggagatagcaggttaaaggaccccaaagagatggtgacggcccccaggactagcatcagagggaagggaagctgttaggaccccaggcctgaagccgccaaggaagaagatgatgcggaagccagcaagcgctgcatgtgcaggagaggatccactgcccggcatgagcacggccttgggaagagaaactcagctctgccagcctctgcactgcaagccttttgtcgaacatatgtttaaataaataaaagaaaaagcagcagtttttaattttgatgcaacccaattcatcttttttgatggctggtgctatttacatcctatctaaggaatgcctgtgttcccttctagaagttttagagtttcagcttctatgtttaagtctgcaatctatttaacgttaatttttgtatggtatgagttagaggttgaagttcatttttaccctttttgagtattcatttacttctaaaccatttgttgaaaagactttcttttccccattgaattaccttgtgcccctggtgaacattggttgaatatatacagacgccttcaccctaccccagccctggggaagccctgctctcatccaggctcctgggtctgggtttgaggcccccttggggctctcaccctggccctgtggtgtgggcatctcagcataatgccccggcttcccaccctgccaccctcccagcatcacccatgcccctctccctgctgtggacctggtccagtggctgccaggtgggttctgtgcactagctcctggtctgggcccttgctccatgggtgactatggacaagggggtgccccttcctgggcctcagtctccccatctttacaatttgagacctgatcaggttaaggcccttccagcacaaatgttccataattctgtgattccacaaagagaatccaagaaagttccatggagcttaaccaggggcagccatctccctctgcctggagctccggatgaggcccaggtctgtagggcaccatgttggggctgagatagtggggacagaacagttggccctgctgagaagaggagggatgtgtgtgcggggtggggggcatatacacatggatgcacatttgtgtgtgcacagctgtatatacattctgtgattgggtggggatgctgatgcttgagtactatacacaggtgtggcgcagcacagcatgatctgtgggggcttgacctgtttgtacacatgtgaatgttcatctccatgtgtggtgcctgggccaggtatccatgcaggtgcatgcatgtgggtgcacacatgtgcatatgtgggagcgtgtggacgtgcactggggctgtgtgcttggggctcacatttatctcatgcctgttgcttgccagccattcttctaagcactttccatgcattaactcacgcaacccccatgatggctttatctgagattgtttctcaggtttgaggaaactgaggctcacaagggttaaaccatgtgacccaaatgacaggttcagaagtggtgaagctgggggttggacccaggctgtctggtctcagaatgagtgatgtggcccatgtctgtggggtctgtgtagacagcggggcgtttgcattcaactgtttcagggggtgtgcacctgtgtgtgagatggcgggaaaggttctgcgtgtgtgcatacatggtggagtgtacgtgtgtgtaggtacaggcatgtgttgtagacaggctttgcacacacatgcaggtttgtgctcacacgtgtgcatctaccagtgtccccatgggtgggtgcttgggcatgtgcacaggcacattggtggggacgtgtgaatttgcaccccagcatgatagaggggaacctcggggccctggcagagaacagagggaagccaagctctctgggaggagagcagcctgctctgtgagttgcattccacgctgcacatttgtgttttccaaaccgggggatggagcactaacgggtgtcagccgcccttggagaatgagggatgtggagagaagggcctcctgggctgctccttattgcacagattgcttttaggggacacatatgaggctggtcttactgagacaaggggtatggccccaagacaggcctcactcatgacctagcgcctcccgggaacttctcagggtgttacaggtggaagattggagacaccctgccctggagctgggcgcgaagccctgggctgaaagttttcctggccagtttgagctccgtgaccctggagaggtgcctcccacctctcagactcggtttcctgctctgggagaagaagccacagcggcatccgtgatttctgtctggatgtgtccgtcctgcccacctttgaccttcccttgtggacttggtccgcctcacgctgagccatggtatggaccaggtggggctgacccagcactggcctggggggatgtgtgaccccagggcgaccatgcagaatgctccatcctcctggactctgattggaagtgggagggacattgtttcctgtggccactgtaacaagtcaccacaaacaaggtggctcacaacaaagacattcacatctcatggccctaaggctggaagcctgaagtcagggtggctgtggctccctctggaggctcagggcatggggggagaattcgttcttggccttttccagcttcagatggctgccggcattccttggctgtggccacatcgctccagtctctgccaccatggccacattgcctcctcctctgtcttctcttccctctcataaggacccgtgacagtatttagggtccactcaaaataatccagaatcatttcctcatcccaggatccttaccttagtcacatctgcaaagacctcttttccaaatacgtgggcaccgcaggttccaggtatttgatgtggacatctttcctgggggctgttctgtgggttttcacagacatgtgaccacaataggccaatgggagcctgccctggggcttctgcaggttttgcgggaaagagacgttctctgtgccccgaggctgctgagctgaggggtggaagccaggagctgccagtggtcgtcatggtcccccatggaaactacctacttgggagtgaagccaacacagaggacagcagagcacagagatggagacggactgcgtcgtggccagattgttggagccctggagccagctgggtcagaagcccaatacgcctgacttcattacatgggctgggaggttttcttgtttcacttatttctgtttgaactgagcttctgtcccttacaaccagaggaatcttatttatttatttatttatttatttatttatttatttatttatttatttattttttgagacggagtctcgctgccgcccaggctggagtgcagtggcgcgatctcagctcactgcaggctccaccccccagggttcacgccattctcctgcctcagcctcccgagtagctgggattacaggcacccgccaccacacctggctaattttttgtatttttagtagagacggtgtttcaccatgttagccaggatggtctcgatctcctgacctcgtgatccgcccgcctcggcctcccaaagtgctgggattacaggcctgagccaccgctcccggccaaccacaggaatcttgaccaacagagctcggggttattcttggggtcacctaaatgatgggaccaggcagacctatggaagaaactgttgcttcacaaaggccgtgtcctgtctatctggggaccagaggctgctgagcagtttctccaggaggggcagggctgtgcagagtcccctctcccaccttcaggatggcctcaggctcaggtcacaatggggagccacggtgccgagctctcagcccctcttcccaaggatcatgcagggtctgaccaatgaactcagctgatcccagtcagatgtgtctgcaattggcagtggctccctggagagggcaggacttgagccagatgaaggaagggagaggtatacagagcacataccatgcttgaaaaaatggaatatgagggtgtggtggtgcagacctgcagtcccagctacatgggaggctgaggtgggaggatcacttgagcctgggaggccaaggcttcagtgagccatgattgcgccactgcactccagcctggacaacagagagagaccctgtctcaaaaaaaaaaaaaaaaaaaagtcgaatatgagtcatttgtccaatgtccatccccctcccctccccgggcctggatgctcctaaaggtagggctggtgcacctgcagttcaccccttctagggtcgtggcctcccagaatccaactcagatcctatccctcctctgctcaagccctgcagtggctcccaactcactcagaacaaaagccaaagtcggggaccaggcacagtggctcacgcctgtaatcccagcactttgggaggctgaggtgggtggatcacctgaggtcaggagttcgagaccagcctggccaacatactaatcccatctctactaataatacaaaatattagccaggcatcatggtgcaggcctgtaatccaagctactcaggaggctgaggcaggagagtcgcttgaacccgggaggcagaggtttcagtgggccaagattatgccattgcactccagcctgggcgacaagagtgaaactccgtctcaaaaaaaaaaaaaaaaagccaaagtcctcgcaatggcacatgaggccttaatccactggtctcaccccactgccctgtcagctttcacctcagggcctttgcacttccttccatcttacaggaattctctaccctaagacatgcacgttactcatttcctcccatttttactcaaatgtcaccttgttagtgaggctgtccccagccaccccatccacactgcacaccccatcctcccctcctgctctctttttctccatggctctgtcagtcactattattatataagtaatacactcattgatttttttgtttatgtccccaaattaggctctcagtgccatgagggcagggaccttggtccactttctcctctgttcataacgagcattttctaaatgggaaatgaatgaacgagctctgtcttctgggcccagtgccctgattgccccttgggaagcctccgtcctttactctcagttcatgtgctgcggatgggtgaaccccacacccagctccacgcaaggacaagatctagccctggcaattggcatatttgaggccactgggtacagctgggcagctgtccccccacacaaggaactgaaacccttcccaccaagccttgtgtcctggcacagagctgtttctcctgagaggaaggggcaccctttttctaactcacaccaaggcacccagggatagccctgaccacgagcaaatcccatcaccttgactgcagtgtttgaatcagggacggacatggggccaggttggcacatgcagggatgttaaatcaggtgaatcctgtgaagtcctcaggggccaccaggaagagaaggtctttcttctagggttgctgtgcttgtaggtagcatccccccaccagcgagggaagaggcgggagcaccactgcgtggctgggagaaactaactggctccctggatccagccctaccccaggctggaaccattcctgggattttttttttttttttttttttttttttttgagacagagtcttgctctatcacccaggctggagtatagtggcacaatcttggctcactgcaacctccgcctcctgggctcaagcaattatcctgcttcagcctcccgagtagctgggattacaggtgcccaccatcacacctggctaaattttgtatttttagtagagacagggtttcaccatattggtcaggctggtcttgaactcctaacctcataatctgcctgcctcagcctcccaaagtgctgggattacaggcatgagccaccaggctggcccgggactttcagtgctatgagcccatccattctgtttttgcctaaactggctggggttgagtttctgtcattaacaaccacaggatccttgtctgacccaggaagtgagataacaacaccctgcaggacagccatgtagctaaattagaccctgcccttgaaaagcaccgtgtcctttttaaacacttgaggcatatgaagggctgctggggatgctggcagcctccgacttcatcacctccttcctctgcccagggctgctccccacaggagtctgttcccctccccagtgcagcctctgccccctcctcaaagaaagtttcagcactcacagctcctctctctcagctgagtgattttctcccttcctattttgtcatcttgaaagatggcaaattggagcacttaattttccccctccaacccaattaatatgaaagtgcacagcgctgatgtgcggaagcgaaaagcaaatcatttatatcaattagcaaaaatgagctttgtgcaaactcgcaatgaagaatgatctcagagacaggaagcccaggagggaagcctgggagggacccccggagcctcctgaaggaagcgaggctttgggcgcagtatcaggattgcattttgtcccctctccctcccacaaggtccctggaatcaagagacttaacaggtaaagccatgcttcactgttctcaaatttcaacaagactccccacagcaagctccaatgcaaagtctttcttgtcaacgtgtgtcctgagtcagcccacgtttctctaccgccactgcctccctgagcggagccccatcatccatcatggcccccctgggtaatgataacagcacctctctctctccaggcttccactctggccgccttcaacccacacccacattcatgcaatgtacactgcagtcagattgagcttttatttttttaaaatcttcattcatgtatgtatgtatgatgtatgtatgtatttttgagacagagtcttgctctgttgcccaggctggaatatagtggtgcaatctcatttcactgcaacctctgcctcctgggttcatgcaattctcctgcctcagcctcccaagtagctgggactacagatgcctgccaccacacctgactaatgtttgttatttttagtagagatggggttttgctatgttggccaggctggtctcaaactcctgacctcaagtgatcctcccacctcagcctcccaaagtgctgggattatagataccagccaccacgcccagccagactgagcttttaaaatacaaatcaaatcatgtcaccctccagtgctgaaaccattgctgttagaataaaatctaaactcctcatcacggcactcagggacccacgtggcctggcttctgccgacctcccagcctctcccctggctccctccattgcagccacgcgggcctccttgctattccttcacgttgccttgctcattcctgccctgggccctttgcacgtgctgtttgccacatcttttcctggctgctcagttttatctttctcgccttgattcaaacgtgactcccccacccaggcgaatgtcactgtccttggttgctatgtatccccttcacatcccttcaatccacagacacctggtaaacacctttcgtgttccagccacattcaaggccctggggatatggcaacaaataagatggacaaaaaccctgtttcatggagttatatcctggtccagatggtgggagaagtgtacaaaaactgccagctgggtaaagaagacaaaaaaagatgccaaataatgaaaagcgctatgaggaaaacgaagacgggaagggaggcaaggctgtacttagaagccgggtggtcagggtgggcttcgcagaagaggtgacacacaggtgaagaccttagcgggaggagggactccgtgcagatgtctgggggaagagtgctccgggcagagggaaaagcaggcgcaaaggccctggggccagcccatgcctgttgtgtttgaggagcgtggaggaggccaccgtggccggggcagagtgagtaggggaggggagatgaggtggaggccaggggctggaggctacggctggactctggcttttgctctgggtgaggtgggagctgagggaaggtctggagcagaagaggtctaaacagaacccctctgtgaggatatcaaccatcagggcccagacaagcactggttcgggagcagtgatgactatggagtaggtttgccgaaggagggccatgtttcttatctttgattctgaatgactctcaaggatcgcacagcggagaaacagaggagaggagaggttttaactcttccctgggggctccaaagggctttcttgggctctctgcttgcattttttcattcattcacttcagacctagcagaggttttggagacagataaagttgggttcaatggccagctccaccacttcctagctgggtgactttgaccaaagaccttaacttctctgggcttaggttgtctcagatgaacaatgggggtcaaacggtaccacttccttcttccttttttcctgcttccttcttctgcttccccttccttcttctacgtccccttccttcctcctttctttcctccttccttccttcttcttcttccttcttcctcattctttccttactctttccttccttccttcttccttccctccttcctccttccttcctccttccttccttcctccttccttccttcctactttcctgccttcctttttttgtcattaaactgttaacttctatgaggactgtgacttggatctacgttgcttattgccctatttccagggcccaagaccttgcttggcacagagtgggtgctccataaatatccatcaaatgggtgaatccccgcgagtcctgagcagatggaaaacaccttgtcagggtcagggttggttggagactggagtaaatgccaaattccagaaacacagatccaagtggggacaacagatgtgtctgccaggaactgaatcacccagcagaaagtgacatgcgtcccaggccttgttctaaattccaagagggcaaacaaacgtgcgttcatgaaatgtttgatgtctgcctgcagctcatgtgtaagctgtaggtcaaatttatgggccagagagagtcgtattgcaaagtgctgtgtgtacacgtgttatcgcactggggccacttgtgtaatcaatatgcgctattcagtctcagggcgtatgttcattgtcttaactatgatggaggtgtagctcggagactctgtgccaggagatcagcagagcctggggcctcaaggggactccctgcgggggagagggacagccgtgtagcagagtgacaatgaaggcttctgatttaatgtgcagtttccaggccatgtgtcagccgttcacgtgtgtggtttcattgaatcctcagacagcgcttgagggacggtcctggactaattccattttacagatgacagcactgcagaacagaggggtctagtgtttttcccaaggtcacacagttctcaagttgcagagtaaagacttaaatccagctgggtgcagtggctcacgcccgtaatcccagcactttgggaggccaaggcgggtggatcaactgaggttgggagttcgacactagcctgatcaacatggaaaaaccccgtctctactaaaaatacaaaattagctaggcatgtggtggcacatgcctgtaattccagctactcgggaggctgaggcaggagaatcacatgaacctggaggtggaggttgcagtgaactgagatcgcgccattgcactccagcctgggcaacaaaagcgaaactctgtatcaaaaaaaaaaaaaagacttaaacccaggtccaccctgactgatcaaaagctagggtgcccaaccccccctggtttgtctaggaccgtctctgtttgaaaacgtacagtcccacaacctggaaacctgcgaagatcccaggctaagaggaactgttgttgaccctatgtaagatccatgctttgaaccacacagttaccctttggtgggaaagcatagaaggcagtggtgaggttttcccaggcggtgtaaactcacacagagggacaagaacctgggaaaggaaagggtatgcttgaggagtggggctgtaactgagtatcccagcctcaaaatgcatttggaaacttttttcctttcttgttttcagccttgaaacattctttgaaatgctctggtatccctttcccaccaggcgctcccgggcacagggctcgcttatctaactgtgtgcttgctaagaaattccagaggctcattttgaaacaaactgggcagagagaccaagctgtagaatcatcccgcttaggcggagttatgaaccgttagcccaccactaccaggcaggagccaggacgacacaaatcagacctcgagatgggcgattgttcgagatgaccatcagaacaaaacccacagccccgcaccctcctgctccactcatgctccacccctgctccactcctgctccacccctgcaggcttcctgcactaagttttccttttttttttttttttttttttggagacagagtctcgctctgttgcccaggctggagtgcaatggcgcaatctcagctcactgcaacatctgcctcccaggttcaagcaattctcctgcttcagcctcctgagtagctgagattacaggcacatgccactatgcccagctaatttttgtatttttagtagagaagggggttcaccgtgttggccaggctggtctcaaactcctgacctcaggtgatccacccacctcggcctcccaaagtgttgggattacagatatgagccaccgtgacgggcccaagttttccttcttaaactcctcattcagcccaaaaggcagagatgacttctttgaagcagaagcctggccgtcttccagctgcttgtactggatcaataaaagtgccttccttccaccacacctcgctaccgcttctcgcattttctgcctctgaacagggagcagctggacttcagccaattagagaagtggccatatttcattggaattttttaactttccattttaaagcaagtatagactcataggaaactacaaaacatattacagaggggtggagccaagatggccgaataggaacagctccagtctatagctcccagcgtgagcgacacagaagatgggtgatttctgcatttccatctgaggtaccgggttcatctcactagggagtgccagacagtgggtgcaggacagtgggtgcagcgcaccgtgcgcgagccgaagcagggcaaagcattgcctcatttgggaagcgcaaggggtcagggagttccctttcctagtcaaagaaaggggtgacagacggcacctggaaaatcaggtcactcccaccctaatactgcgcttttccaatgggcttaaaaaacggaacaccaggagattatatcctgcacatggcttggagggtcctacgcccccagagtcttgctgattgctagcatagcagtctgagatcaaactgcaaggcggcagcaaggctcagggagaggtgcctgccattgcccaggcttgattaggtaaacaaagcagccgggaagctcgaactgggtggagcccaccacagctcaaggaggcctgcctgcctctgtaggctccacctctgggggcagggcacagacaaacaaaaagacagcagtaacctctgcagacttaaatgtccctgtctgacagctttgaagagagtagtggttctcccagcatgcagctggagatctgagaatgggcagactgcctcctcaagtgggtccctgacccctgacccccgagcagcctaactgggaggcacccaccagtaggggcagactgacacctcacagggccgggtactcctctgagacaaaacttccagaggaacgatcaggcagcagcatttgcggttcaccaagatccgctgtcctacagccaccgctgttctgcagccactgctgctgatacccaggcaaacagggtctggagtggacctctagcaagctccaacagacctgcagctgagggtcctgtctgttagaaggaaaactaacaaacagaaaggacatccacaccaaaaacccttctgtacatcaccatcatcaaagaccaaaagtagataaaaccacaaagatggggaaaaaacagagcagaaaaactggaaactctaaaaagcagagcgcctctcctcctccaaaggaacgcagctcctcaccagcaacagaacaaagctggacagagaatgactttgacaagttgagagaagaagacttcagatgatcaaactactctgagctacaggaggaaattcaaaccaatggcaaagaagttaaaaactgtgaaaaaaaaattagacgaatggataactagaataaccaaagcagagaagtccttaaaggagctgacagagctgaaagccaaggctcaagaactatgtgaagaatgcaaaagcctcaggagccgatgcgatcaactggaagaaagggtatcagtgatggaagacgaaatgaatgaaatgaagcgagaagggaagtttagagaaaaaagaataaaaagaaatgaacaaagcctccaagaaatatgggactatgtgaaaagaccaaatctacgtctgattggtgtacctgaaagtgatggggagaatggaaccaagttggaaaacactcgcaggatattatccaggagaacttccccaatctagcaaggcaggccaacattcagattcaggaaatacagagaacgccacaaagatactcctagagaagagcaaacacctctacgcaaataaactggaaaatctagaagaaatggataaattcctcgacacatacaccctcccaagactaaaccaggaagaagttgaatctctgaatagaccaataacaggctctgaaattgtggcagtaatcaatagcttaccaaccaaaaaaagtcgaggaccagatggattcacagccgaattctaccagaggtacaaggaggagctggtaccattccttctgaaactattccaatcaatagaaaaagagggaatcctccataactcattttatgaggccagcatcatcctgataccaaagcctggcagagacacaaccaaaaaagaattttagaccaatatccttgataaacattgatgcaaaaatcctcaataaaatactggcaaaccgaattcagcagcacatgaaaaagcttatccaccatgatcaagtgggcttcatccctgggatgcaaggctggttcaacatatgcaaatcaataaatgtaatccagcatataaacagaaccaaagacaaaaaccacatgattatctcaatagatgcagaaaaggcctttgacaaaattcaacagcccttcatgctaaaaactttcaataaattaggtattgatgggacgtatctaaaaataataagaactatttattacaaacccacagccaatatcatactgaatgggcaaaaactggaagcattccctttgaaaactggcacaagacagtgatgccctctctcaccactcctattcaacatagtgttggaagttctggccagggcaatcaggcaggagaaagaaataaagagtattcaattaggaaaagaggaagtcaaattgtccttgtttgcaaatgacatgattgtatatctagaaaaccccatcgtctcagtccaaaatctccttaagctgataagcaacttcagcaaagtctcagaatacaaaatcaatgtacaaaaatcacaagcattcttatacaccaataacagacaaacagagagccaaatcatgagtgaactcccattcacaattgcttcaaagagaagaaaatacctaggaatccaacttacaagggatgtgaaggacctcttcaaggagaactacaaaccactgctcaatgaaataaaagaggatacaaacaaatggaagaacattccatgctcacgggtaggaagaatcaatatcgtgaaaatggccatactgcccaaggtaatttatagattcaatgccatccccatcaagctaccaatgactttcttcacagaattggaaaaaactactttaaagttcatatggaaccaaaaaagagcccgcatcgccaagtcaatcctaagccaaaagaacaaagccggaggcatcatgctacctgacttcaaactatactacaaggctacagtaaccaaaacagcatggtactgataccaaaacagagatatagatcaatggaacagaacagagccctcagaaataatgccacatatctacaaccatctgatctttgacaaacgtgacaaaaacaagaaatggggaaaggattccctatttaataaatggtgctgggaaaactggctagccatatgtagaaagctgaaactggatcccttccttacaccttatacaaaaattaattcaagatggattaaagacttacaagttagacctaaaaccataaaaaccctaaaagaaaacctaggcaataccattcaggacataggcatgggcaaggacttcatgtctaaaacaccaaaagcaatggcaacaaaagccaaagttgacaaatgggatctaattaaactaaagagcttcttcacagcaaaagaaactaccatcagagtgaacaggcaacctacaaaatgggagaaaattttcgcaacctactcatctgacaaagggctaatatccagagtctacaatgaactcaaatttacaagaaaaaaacaaacaaccccatcaaaaagtgggggaaggatatgaacagacacttctcaaaagaagacatttatgcagccaaaaaacacatgaaaaaatgctcatcatcactggccatcagagaaatgcaaatcaaaaccacaatgagataccatctcacaccagttagaatggcgatcattaaaaagtcaggaaacaacaggtgctggagaggatgtggagaaataggaacacttttacactgttggtgggactgtaaactagttcaaccattgtggaagtcagtgtggtgattcctcagggatctagaactagaaataccatttgacccagccatcccattactgggtatatacccaaaggattataaattatgctgctataaagacacatgcacacgtatgtttattgcggcactattcacaatagcaagacttggaaccaacccaaatgtccaacaacaatagactggattaagaaaatgtggcacatatacaccatagaatactatgcagccataaaaaatgatgagttcacgtcctttgtagggacgtggatgaaactggaaaccatcattctcagcaaactatcacaaggacaaaaaaacaaacaccgcatgttctcattcataggtgggaattgaacaatgagaacatatggacacaggaagcggaacatcacactccagggactgttgtggggtggggggaggggggagggatagcattaggagatatacctaatgctaaatgacgagttaatgggtgcagcacaccaacatggcacatgtatacatatgtaacaaacgtgcacactgtacgcatctaccctaaaacttaaagtataataataataaaattaaaaaacaaaaaacaaaacaaaacaaaacaaaaaaaagaataattacacatagtgtccgaattttagaggaaccaggcacagaggaaaaaaacatgttccaagttttgttaagaggagtatactgatcgacagtgttaaaagctgtagctagtttaaaataaagtgtacctgactttaaaaaacaaaacaagaattataaatattctaaaataaagataaatagattgcttccttcttttgttagtttagtctattttaacatttgtcctgcttgatatttataaacattttagctattcctaagttctgttcattttttctgttataaaaaattttttctgttataaaaaatgtaagagttgagaacacctggtaaagctctacagctagttatatgctgtttttcttgaggaagtttaaacctctgtaaatcacaaaatatctagggtggttagaaacataatagacaaagacatttggttatttctgtggtttacaggagcttaacataataattttaattaaaattgacagcacatattcagagattaagaacattaaaaaccccatgtggttttgagacctgtgttaatattactcaggaaaatatattctgaaaaaataaaatattaccatcaaaataaaaaaaaaaacatattacaaagaatcccatgtagaatcccctttgcccagcttcccccaacagcagttccctaacctttttggtaccaggcactggtttggtagaagacaatttttccacagaccagggggcaggggtagggatggtttggggatgaactgttcaacctcagatcaacaggcattacttagattctaataaagagcatgaaacctggagctctcacatgtggagttcacaatagggttcccgctcctataagaatctaatgccgctgctgatctgatggccactcacctcctgctgggcggcccagttcccagcagaccacggatcagtactggcccgtggcccaggggctggggacccctgctctgactgactaggcctgggtcatgtgtcctcccatggaaccagaattaggatcagcctgaaagtgggggacaaaagattctccaagtgaaactgggctaccgtcaccagaagacagaggagagacagatgcttaatgggcaccaaccccagatccggaaggactctgccagtgtgttcaggacaggctgcaggtgagaggtcagctattgtcactggccagtcaagaaatgaacaaggtgggggcaattgtccgttaggcccagagggagcagtgcttagggctcatggcacttgtaggagcccacacaaatattttcatttctttgaaaatcagggccaggtgcggtggctcatgccaataatcccagcagtttgagaggccaaggcgagcggatcaggagtttgagaccagcctgaccaacatggtgaagccccatctctactaaaaatacaaaaattagccgggcatggtggcgggtgcctgtagtcccagctatttgggaggctgagacaagagaatcacttgaatcctggaggcggaggttgtagtgagccgaggtggcaccactgcactccagcctgggtgacagagcgagcttccacctaaaaaaaggaaaagaaaatcagaagaaaaagtgactatactttagcctggattatatttgcttttatgccaacatagtcataaaatataagtttaatttatttctttttaggaagaaggggcccaggaagatggacacagtagccctaggtatttgcttggatatggtggacagagagaggcaattaggaagtttcccaaatttggatcctggcacctaaaaggatggtttggtcatctgaagggggatgggtgaagaactgagtctcagccaacttagttgcaggtgctaaggcgaggataggattatagcctttggggtttggatcctagatctgtgagcaccagagtgaccttgggcaaggccctttacctccctgaacctcttgttccccatccatacaatggacagaataactggcatcttttctggattgtcatggggattacacgaagcatcacatgtgcttagcaaagggttcagcatatagacggtgtctaacaaatggagtctgggtattagatttgggagacctcagaagagaatttgataaagagattaggaccagaaatgagatgacctgaagctgtgagcaaagagggattgtgcaagaaagcagttgaggagagacaaggaggcagaggtcccaggacatgagccactgaggaccctaggagggagacagttagcacaggtggtaagaaaggaggtgtatcctggcctcaggatcttgaaagcaaagggaatgatgggcatcaggaagctggaggttattaccagggtctgagtggtggagaaaggttctgggggaaagaaagataaaatcgatatctgtgcttttgtctgagcagtttctaagccccatccttttcattcattcacttgttcattcatctatgcattctttcagccagcaaatatttactgggcctggagtggtggttcatgcctgtaatcccaacactttgggaggccaaggtgggtgtatcacttgagtccagcagttcaagaccagcctggccaacatggtgaagccccatctctactaaaaatacaaaaattagccgggcgtggtggcgggtgcctgtagtcctagctacttgggaggctgagacagcagaatcacttgaatcctgttgaacatggcgaaatcttgtctctacaaaaattagctgggcatggtggtatgtgcctgtagtcacagctatttgggaggccaaggtgggaggattacttgagccttcgacgtggaggttgccgtgagctgagatagcaccactgcactccagcctgggcgacagagtgagacccagtctccaaaacagacaaaaaaaaacccacaaaacaaatagttactgggatcatttcattgtatgttggtcacaaggtcaccacttatgcagtctctgccacagggccatctggagctctcctggttcccacctgtcccaagtctgcttctcaggcttagctgatcatctgagcctcctttctgcatccagtaaaccccatcggcctcagtgagccagatccagtttctgttgctggaaaccaaagaacccgactggatagctcccccccacacacagtgcatgtgttttgtaggggaatgactcctacagtctacttcagggtgggcatgtcgcctaagccaggccaatcagagcagccaacagtcagtgggcctcactctagtttactgagagtcactgggatattgctggaactctcacaagggagaaagtgtctttccactgggctttgctgagctggtaggatagcagaccagagttgatgggggccatcaccatcactgtgagggaagagctttccaggggatgaagtcaacagcaaaaatcacagatgagaaagggagacaaatgcttcatagtatcactagagctcctagatccagcctctcctgaaacccctagactttcccactgctgggccaatgatgtcccattttgacttaagtcagtggaattgggcttacatcctttgcaatcaaaacacgcttctgtttaacacagagactacaacaccctgaaacaaattgcaatctccgcatttcttcatggacaaatggtgtaactaactaaatgtgagaacgcagcgcacagcagtgcctccgtacctgtcactcacctttcagtcccctaggaggactcaggcatgagcttgccagccagaaaaaaggaaggaagctgcaggctatttctcaaattcacattccaaggtgaacaacaggagcctcacctccccctgctcgctaaactcacacacattcccacatcagcttttcatcacagtatcgggccacccaaagtattccaaaatagaccatctaaattctaagaagacaagcaaagccagtgttaatgaaatgtataatgcctgttgtagctcacaggttagttttacatcaagtttatgggcctggagcagtacatttataatgtatgatgtgtgcatgtttactacattggcgcacccacatataatcaacgtggactagagatttatggccatctttataagacttggagtataatttcattacttttaaatatttacagaggctgaaagttgtaactttccttttatggcgtagtgtgggatactgtggtcctgtctgtgatgtgtttaatactcagtcctcatttagaaaaaccccgaggacagccctgggccttttggggacaagcagctctctgaggaccccacaggaggccctggggaggaggaggagttctgagcagacatgaaccccagtgggtgggcgggcaggtctgtctcagggctcagaggagacccttccctgtgacccagaagctcagaggagactcctgggaagaggcaggactgggctgagcctggaagggcaagtggggccttaggaagggagcagctggggggcggggcttcccaagagaaaccacatgatgctgtggtcgacgtccccaagctctaagtcactcaggtttcatgctgttgtgtctccataaatcttccccagacagagtagagaaagaaggacaaagcataaatccacagaagttggacgatccttattttgggagggagagtctaggtcaatgtctggttctggatgcatggttgtaagcaggaactgtagggaggcactggtgacatgggtgggatcaatacgcagctctctccaaaggatctgagtgaacccattgaaaaagacccctcccacatcccagtggtttccacagtgacgaaaggagactaaaggttgtgtgtgtgtaaattagcagcagagtcagctgcaagtgacaataaacccattataaatgtgccttagggaagacataaaatgatttgcctctgtggtaagcaaagcccagaagtaagtagccagggctgatggaatagcttcacttggaaaaaggattcaggcacaaaccagttattcagtcaagcacaacgcattacacacctcataattcaatatggctgcttgagctccagccatcacactcacattccacttagcagtggggagggaggtgcagaaacatgtgttcctgttccctgaagacactttctggaaattacacatggcccttctgttcctgttccattgacaacaccttaattacacattcacatatataatcgcaagggaggctgagaaatgtagtcattattttgggtagctatgtgccagctgaattctttcttcctgaaagaggaaagggagaacaaaattggaggaagtcagcagtctcttccattctgtacatgaatgtttgcacaggtgaggcccctaggtgtattgtgggaatgtgtccacacctgtgttggaagcattgttcaccatcagttattaagcatccactcaagaaattctgctgtgtaagaaaatgcatggataataaatgcatatgggccatggattctatggaaataaatatatgtatacgaatagatatgggtataagtgtaattgtgtatgctcatgctcacatatgtattccctaatttgcttatttattcagctagtatttcctgagcccctactatgtgtctgggactgtttcacacacttgtgatttagcatggtaacatggcagtcaaggtcattgatctcatgaaatttagtctattggaagagatggacaaaacccaagtacatgaataatcaagtaagataatatcatcatgacatttgtgtaatgaagaaaataaacagtgtggtgctttagggatcaatggggagaacagggtgcacccatgacggacaggagggttgtggagggtgtccctgaggaggtgacattgaagaaaacccatcggcccaggtaccgccaggcatttgtttccagctcactccccttctcagagctccaggcgctgagctccagatgccaccaaagtttattctgccccaggtccacgtggcccaagggaagctcctgtttctcttgcacaacctgcccctccctccctcaggctgcctcatgcagcccgtggatgcactatgtactgaatgctggaggggctgggtaaggagcagtccaggcagagaaagcagcagtgcaaagtccctggggcaggaaagacaatcctctagtggaggatagaaaggaggccagggcacagccagccccaggtgaccctgaaatgaaggagccaggtgagccccaacaccaccctgctgacctcccactgggactccccactggggggacacatcaagaatcagaagcaagggagccttgtggtgtgggccacctggtcagcctgcaggtcacagagaaggggaaggtggggagaggacccggaggacaaagggcagtcatgtggcacaggctggggccaaggccggggcgctggcattcattctgagtcaggtgggaagccgtgggggcagcaggcagagagatgacaaggcctgacttgcaggtttaaagtgtcctgtctttgccatggagacagtaaactgcagaggccccgggtggaggcatctgcggtgacccagggagaagtgatgggggctctgcctaagtgtggacagggcaggtgtgcagaggcggcctgccttgggtcagagtggaaaagccacactgagggactccaggtggctctcaggtctgccttgaacagtagagtgacagccccgtccctggacagaagcagcctgaacgtctgagcaaatggcgggatccagaccctgctggatgctgggggtgagagctggaatgggacaaacagcctctcgccctgggccacctccagaaaagtccacctcgggcctcagaaggtgcagacagcgggaatgagcgaggtgcccaagggtggccccgcgccagggcaccgctgtcctcacattttctttcccatccattaggaggaaatgcactggggccacagccggcttcctgctgagaaatcaatggctcattagagttcacctttgcttcccctctgccctcaggctattaaaactggccaggacagagcaagactcagcctacccaggaaggacagcaggccccgcccctcctgcaaggccactccagccagggcagcagctctgtccccaagaccccccggcagccttgctgagggcctggccccggccctggccctggccctgcagaaaggagaccacgtcagcctggagtggagcaggcgcagctgtcctgcatccccagttcaaatcctgtctccaccactcatgggacctgtgaccctgggagtcacttcccctccctggggcacagcctccctgtctgtaaaatgaggtttaccatgagagtatcagcgctcctcttgcaaccagaggctccactggtttgagcagagaaagcaatagattaaagggttgtcaggggctttggaaactctgcgaggacagagagacaagtgtggggggctatgcaggcagcaggacataggatccctggcaggactgatccctggggatccagcattgctgctgtggccacagataccgcagcctgcaccctgacacccacccaggggccacggtgcaaattcctcccccacactcagtccaggtggttcaagccccttctccgcacagagatgtcacgtgacctgggtctggccagtaagatccgtagactgtctgggccaatgaacgtcaccccaaggttgtgccagactcactgggaaagagcccagtttctgctgagggtgctaagttggaggatggaagcctggctgctggggacctgccttgccactacctgaagggccagtctgagaactccactgacacagagggaagcagggctgagagatggagagaaggcaccctagtgacactgtaagagcccctggatgcagctgtgcctgaagccacattgtgaatgtggaacagcaaaccagacatttttgtgtctttgttcttggttttgttgcagtccttgatttgggttctgccacttgcagccgaaagatcaaaaaataatacaagaaaacacctggcatgccataggtcagtgttaattccaacactgggggaggagggtgttagaggtgagcagtggaggtgaggaaaggagagagatgagagccccatgcacttcttacccatatcctcaaggtgatgggattccaccatctgtgacatgaagacctggggcaggggtccgggcactgcagggaggggccctccattctcatcagctcctctcccctcccagaggtgagcagacatcctcccaggggacccagggtcctgatgtggagtgtgtccaagggagtttatcggagggcagggaagggaccccagacatctgcttccaactgttgccctgttctctgtgccaacagcccacccagggcagcagcgttgtggaatcttcttcccactcacacctggagaaaacgcctcatggagatatgggcagagcctggtatttggcaccaaacacacctgagtgcctgataccctctgtcactcactggctgtgtgaccccaggccggtcacctcgccctcccagcctcagtttcctggtcggtggaatgggggtaatggtaacatagattaagggaggcttaagggagtcgacatgtatgaaagtgcctggtacatggcaggtgcttggaatgtgcgccctggtttttccctcctgccaagaggcctggtgggtgcaggaatgacaactgagtccacatctgcccttggtcaattaaacaaagtggctcggagcgtgaaatgcaactcctggtctgttttcaggactcaataaccattcgtgtggccattatcaccatcgtcaccattgtgattgttatgggttgtggagacgcacacctgacatgctgacttggggagatctgggcactgatcagaagcgtgtttatgtgaggtgctcatagcctgtgatggtcagggagagccttccagaagaggacctgaagtggcatccaaagttcatgggggcttgggtgaggtagggagtgctgaggaacaatagctctaacacacgtgcagctgctgcttatcgatgcgttcactgtgggcagctggggcctgggtgctccaggtgcctgagctcattcaatctccacagccccaggaagtcggtgtgagtttgatcacccacatttgaggctgaggcaggagaactgcttgaacccaagaggtgcaggttgcagtcggctgagatcgtgccactgcactccagcctgggcagcagagcaagactctgtcccaaaaataaaaaaacggttactgatgaggcaagtgaatggcagacaggttagtaacttacccaaggtcacacagcaatgaagtggcaaagtggggatctgatctcagacagctgcgcccaggagtccaccctcttgaaccctacgctgtgctgtcactacggtggctcttcctcgtatcctctccccgtgattttaagacgcactgaatttttaaggacagcattaacttgacattgagggaagattttccgccttgtggcccatccactgccatgctcttgcagtgtgaggtcaccgcaccccaccatcacacgtgtgccagtctgcatttgtcacccacctgcattccctgtcctgctgtgaggtgtgaccacctgatggccccattccagtgtgttcatcctcagagatgtcaagaaagcagctgggtgcaaacgagtcctatttagagaccagatgaggcccatctcagcccaccgctcaaatggggaaaatgtaccttcgttattttctaaaacttcacttagtcttggcagcattagagcaagctggttgaagcatagactctggatctagaatgcctggtttgcatccacttcctcccagcagtgtgaccctggccaagtttactggaacacactgtttctccactgagcatgctgtgcctcagtttcttcatccatgttgtggggataacagaatctttccttagtatggctgagaagattaaaaactctttcccataagagtacttagatcaatgcctgtaatgatagatcttattatttctatttgagtcaatattctgcacgggcagtggaaacgtaatcttagacaatttgggattgatgctttcccttttctgagtctttacctggtaccaggtgacagcagggaccaacatggtgcccaggcaccacctcccagagccagtacttgctgggacatccattcttcagcctggatcatgagtgtcagctcaagtggttgccacggaagtgctccttgtggctgaatgatggtccttcctgccaatctctactacttcagtgttgcttgaggcacatgtaaaacacctcatagatcctgcaccaggggagggaggtgaagggcaggcactccgccaccctcaggacccgactgccaatccaggagttacaaacgcagatttctaaaggggtgggcaaatgacctaagtgggtagatgggctagcggggctgcagaagagccctatgtataagggtggccacttctcagctctgccaagcagttgtataagggaaggcagaccctgtagagcttttctgtttttaaagaagccagagtcgtttgtgtgaaataacctattaaaaaaaaaaattggcaaaaaaatgttcaaagaaccatgtgaaggcaaacatattggaaaggaagaaatgaaactatccctatttgcattcgacacacttgtctatatagataattccagcaaatctcaaaaacaaaaatgaaacgaactcctcctagaaccactagaactaatagtgagattagcaaggtcgacaaagaaaaatcaatcatatttctgtacgataatcacgtatgattagaaaaaaaattaataccacttgaaaaagattcccaaaaatgaaatacttaagtataaatctaacaaacatgtacaggatttgtatgctttaaactacaaaatattgatgaaagaaatcaaggaagacctaaataaatggaaatacataccatgtccatggattgtagcagtaaagatggaggacaaaagcagtcaagatgtcagttctccccaagctgatcttcagatttagtgcaatgttaataaaaatgccagcaggaatttttatacgtacaaacttattgtaaaatgtacaggcaaaagcaaagaaactagagtagaaaaagaacaataatgtcagaagcatcaccaccctacttagactaactgtaaagctgtagtatcaagactgtggtattgatgaaggaattcatacatagatcagtgaaggagaatgaagagcccagaaacaaacctacacaaatatgggcagttgacttttaacagcggtgcaaaaaaagccaatcaatggagaacaggtagtacactcaacaaatggtgtttgaacaactggtcatctacatgcaaaaaaaacaaaaacaaaactgaacctcaacctatatctcacatctggtgcaaaaattaactcaaaatgtatcataaatccaaatgtaaaacacaaaattataaaactcctgctcctccagtggaaggctgcttagaataagaaagctaaatcaggggcgtggggggatggggatgatgaatttcccgctcacctaagtatgaggaccagactcagtccacagtctgactaatgctcatagttcaggcctgggatgtccctgagggtgggaacagggcccattccctccctgcatccccaacacccaggggtggatgtaagctgcctctttgtggcctctgccaggtagggggtcaggaggctgcatccttccctggccctgggagctggaacagactgctgcccccagccccctgcccccaacagcctggggcccaacagctgctgggtaattcctcagcccctggcatgtgtctgcccagactccgtaatccccagacctccacgggctcaagtgtcagttgtgcctgatcagagaaggagggaggaggaggggcggagtgatgcagaggaggagacaagggaagggaaatacttggcggccctgggaaatccacccctgcagcagctgtgaggactcatggtgcactgagattggcctccccaccaaatccacaggtatttatggagggcccgccgcaggggtcacaactggacgtcccagactcaaatgcagcccacgggcatttgcaagggccgggcatgttcaacacacccaacactcagtaagttaggacagacaccagcaatgcccggtgggtgctcactgtgtaaatacgtgccctgggcatgtgccctgtggctgtgccctgtggtcctgccctcatttgcctgctgcagatcctggcacccacgtgctatgattgatgaggctcttgtcagagccacttgaggaggcctgtgtgcacccaccagccaggacatccaggaagccagtcacagccctagttctaaaagcccaattctggccttccaggaagcttcagccgacaaagtattgatcagcccattggatgataggagccttgagctgcccaggttcctgcaagattcggtgatcctcggttccaggagcccgtcctcccagggcggagaagagcatcccggggcttctgcaggaggcaggagggtgggcttcagggcacacacagaagaccccagggcaagtcaggacccagggctgtgctctgccaccatcttggccctaaagtaggcattcttactttccacccttattacaggtaatgaacaggaccagccctttagtctccctgacgtacaaatacctggaggccctgtagggctctggcctcaatttcagccctgctcctgccatggactcccaacagcctccactgatggcaactctgtgcccaccctgcacccagctctcggctcacagtgccctcttcttcttcccagcgtctccccagggcaccgtccccactttaaggaccacaggcccaggtgcagtaactcacgtgtcctggacctcctgctgctgaggctgccgccacatgggacggggtcactccccactgcctgatcccccatttgcagccccctaaactctccaggccacacccacccaggcttggccttgctgttccctgtgctggagccccgtgtccccacccattccacccccaattcttccgggctcccccatctcctccaggtctcaggattccttctgcggcagtcccctgggacctcccttgttgacccagcacccaagactctcagtccatccctccctccctccactgtttcttcctaagacttatcccaatctgacattatagtttatatttaaccattcgcctcttcaatgtctgtctcctgtcttgaaatatcaactccaggagggcagaaatttgtggcattttttccactgctatgttctcagggcgcctggacacgccaccaggaacttacaagtactcatggatgagtgttggggaaacagatggaaagaaaaggcctggggagggaggcacgggctgacgggcagcgctggccttgggacactcagggaaccttatggcaaagtcaccgcccccagggctccatgtcttgtgccttcattcattcaccacccattcattcatttattatttcacccaaacaggcctttgctgaacacctgccctgtgccagcagctactatgggttctgtgagtaaagcaatgagcaaaacaaaccaaaattccttcaaagactttaaagttccatagtggaaggtgtttacctcgcccctatcacctcaattgggaggggtgaggagagaaggtcccaggaggaaggggtttccttcctaggcagctgtcacaggtcccggcgagctgtcatggcaggcacagcccaggacacccccagacccagtgtgacaagggccctggtaagacagggaagagaaaagtttgatggtgacagaagccagcaagaggacagagggacagaggggatggaagtggcggggtccgggtctgggactttaaatggggtgaccaaggatggcctcactgagaagcaacatctgggtcatgaccagaaggaggacaccaaatcctccctgtgagggacacgatcatcatccttattttccacgggaggctcagaggagttcagtaacttccctgaggccacacagctgctgcatggcaaagcctggtttcaacttgaaatcaggctcttgacaggctataactctgctcctctacgtcttgccggggctcttggtcactctaggtctgagtgtcctgggctgtgtctgccatgagagctcacccgggggcctgtgacagccgcctgagaaggacgcccctcctcccagggccttctctcctcacccctcccgatgttctaatgagcagggagaaaagacatcatacggcacagctagaattcattccaatattaattctgaaacctcattttcagcggataattaaattactttttaattacaaacagaatatctgtacattccctctgagtgagcacgggcgggtggggagggggaaaaatggtgccgcctggcatttcctgctctgtccccagcacacagcacccctgcaaatggtccccttcttgtcacatctgaaggctgggagcacatgtccaggcgacccacctgcccagtcaccggacaaatcccaccaatgaagccgtgttctctgctgcacgcaggcagagcatgaagcccccgcactgccgccaatagccacctactccccagcccctaaaagtgctcaaagggaggacatcaagtttccactaaaacaaggagaaaaggatcccctcgaggtgagctaaggacagcagagaccacattgcctcagatgggctgcagagaggggtctgcggtgaaggcagatgcgagctgtcctgacccaggcacttctgcaacccagcagagagcccgggccagggcacagtgtcactgcagaaagcgacagtggacggcagcctcttcccttcgtggagacacatgtcacatgtctgcagctacagggtcacagcagtgtcccctcctgctctctccccagagagcccctcctgcaccctctgggctgcctctggctggagtgtccaggctgtccaggcctgggcaggtgaatgacagaggaggctcctagaggtgcagcctcttgaccactgaccaggtgcagcctggggaccatccccaggccctggtcaccaagtttttggggcagggtggcctggtggccgcagactttggggacagaggagctgggtcagctcctggctccacggctgagcagctgagaaggggtgagtgtctgctgccagccacagctgtgccctgggtgaggagagggcccacctgggctgggggagcccagagctgcctgggcagggatgagcatagatggtgacggccacccacagcagccctgtccatcagaatccaccctctgcatgaccagccctgaaagccaccttctgttggcttcttccttctccttgacctctgcctggcccgtccttgcagcccccgtcagggggacacatggctgtcagcacagtgcagcccccgggagcagatggcagcgtccagtccccatgtcctgccccacctgcctttcacatgaaaatgggagagacagccaggcagatgtatacgaagccaggtgcactgggcagtgtggacgcaaggccatgtccccaccaggtggctggagtagctgcttgacaaatggcctctgctggtgcctgtcactcctgcagcctctgtccctggagccctgtccatcctctgcacagaaatcacacctgttatctcccctcccccagcactctgcgaccacaggatgggaacagccagcccagcctctgaatgtcccatggcctggtgagcacgagcggtccctttattttaaagtgacacccagatacccagggtgaggagcagagccgaaccttgctgctaggacgaaaacgaaacagccccaaaagggaacagctgccactgagcttcccggcccctcctctgcacctcacaaggcccggggtctcggaacagaagtggactggcatttcacccaactgcttcttcatttatttcttccttccttcattcagcaaatgctgacagggtctccccactcagaaaggaggggatgacgacagcctgctcaaatgttgttggagggccgtagctcatgcctgtaatctcagcactttgggaggccaaagcacgcggatcacttgaggccaggagtttgagaccagtctggctttttggccaacatgatgaaatcttatctctactaaaaatacaaaaatttgctgggtgttgtggtgggcacctgtaatcccagctaccggaggctgaggcaggagaatcactagagcccacgaggcgggggttgcagtcagccgagattgcaccatggcactccagcctgggcgacagagcaagactctgtctcaaacaaaaaacaaacaaataaacaaacaaacaaaaatgttgctgaaggactaacacagcttttcgtgggagtgcctggcacggcctgctggtaggagacgccgtaggatgcttcctgtctcagaacctccccagagccttgtgctggcctcattaaaaatgagttaaatttactgccctaaatttccagaatcaatggggaaaggccaaaaagcagaaaccaggatccctggccctaaggagcctccgttttctcatctgcaataggggactgggggaagacaggagttacctgagaggattctgcctgcatcgtgcgcctggagcccagtggggattggatttcccagacaccttctcttccacttctctctctcatgcctcctgatcgctctctgaaattaccttatttatttgattatttgcttattctctgttttcccagcagactgtgactcgagtaagcagagaggacttcctagaagaggggacttgagtggggacaatgggattaagagaggcagaaagttggtgggagtaaattccagggagcataaggcattcaaaacccagggcccagagcagggatatcacaggcgcagtcttgacttttgttccctcccagaggctcagacttatgccattggagaacgggtctttgaaaattaattcaatgttttattcatccttaaatgctttaaagctacaaatcaaacagtcactgggtgctttgctaaccatgtcctgggctcctgtgttgccaataactgtgctctttcacataccaacctgacctttctctgtcccaggcaaatgaatttctcccagtgttcattgctctaattgcatccacagtgaggcagagcaaacatcttctcctcctggcttgcattatgcaaaaccttaatctccccaggtttcctaaagcactgtgtgattcgcagcctcccagtccaggaaatgcactgtttgatctgccagtccatatacattagatttactggggcaaataaagagcgttgatactataaactattgggaaataatgaacgcccccccactaccagcccaagcatggacatcccatatatttgcctcttaggaaaaaaaatacgtaaggttgctgatcacaaacatattgtcagatttatatcctgtgtgcaatcaacaaaatgaagaggagagcggatttctgtctcgggcaaactcttgggctgtctggggctggggctggcccatcctgatcttgggctaaattggcctaaagaaagacccctggaaggcaaggcaggaaggtagcatgctcagggttgtagcaagaacacactaagagagagctggctttgaagcctggctatgcacctttgttgctttgtgacattgagtgggaaggtggctcaacccttctgggcttcagtttcctcacctgtcaccaaaccagacagccgagggttaaatgcagtcctggatggaatctttgttaggcagcttctgtgcctgccaggccctggcctggggtctgggtaaatagtggagaccatgataggcaggaccttgacctcagggtgcccagagagaacaggccagggaagaaagctgttgactgggtaacctcagactatgacaaggcttgtgagagtgactggggagaggacagtaacatttaccagataacagagactcaacactatgacaatggctgttgatgagcacagccctctcataccctgacctgaccgtgtaacagaaactacgaacagaaactagggtaacggaaactgttaccgtagaatagtatatctggtgaaaatacccttcaaacatgagggagaaatactttcccagacaaacaaaagctaggggatttcatcaacaccagacctgtccaaaagaaatgcaaaagagagttcttcaatctaaaagaaaataatgataatgagcaataagacatcatctgaaggtacaaaattcactggcaatagtaagtacactgaaaaacacagaatattataacactataactgtgatgtgtaaacactcttaagtagaaagattaaaagatgaaccaatcaaaaataataactacaacatttcaagacatacgcagtaaacattccaccatcattctctttttctctttctctccctccctcccttcctttctgtctttttctctctctctctttctttctttctttctttcgtggagccagttagagccataaatccatgccaatttgataaccagcagccaccagccatgggcatgctgggttttgatgctgggtgtcaggactgaatgcagccaaataaatgcattcattaacagatgtattattattaccattactgttattctttacgttaccattttatagatgcagaaactctctcctaccatggaatcagtcatcagcaagacatctctctttgatatgcatcctgtcttccttctctaaactcctttgcctggagttgagtaggaaaggtatgtcttgttcctttgagttcttaagctactgtctctcagccaaaaacccactctcctccaagctgcttggtgatattgggcagtgactgaccctgcaaatgaccttttgactttgctagtgacttcctgttgggctttgccaatgggggcactagaggaagacttagaggctggagaagaaagagaggacttgctcttttgtgtatactttctgttcttcttcttcttcttcttcttcttcttcctcttcctcttcctcttcctcttcctcttcctcttcttcttcttcttcttcttcttcttcttcttcttcgtttgtttccctgtcaatgtcactgtagtaccctcaaacacaccagcgttgttaatcagccagtgctagataattttcagccccatcttctcactctgcaaggtcccagttgctacctctgtgatacctcagtgcaggggttggttttttttaaaagggtcacatagtaaatattttagtcttgtaagccctatgatctttgttgcaactatgcgtctctggtctcgtagtcataaacaatatatagacaaatgggcatggctgtgttccaataaaactttatttacaaaaacagctcacccctgccttagtgttctctgtttgcatttcaattcttcaatacctatttaacgtttacacacacacacacacacacacacaatttttgttaaaataactagtatggttcagaaaccatagtatgaaatttacaaagcaccagattaaccatcttatcattggaacctcactccccgtgaggtgtggattgtgataacaacaataaaagtcccctgactggacccttactcagaaatcagaatcacaattatggttcacatctgtcttactgaataagtcatttaatgtacttgctactttttgttcttcaggtccaaagagcaaagtgtcattaatgtagtggaccagtgcaagttttgtacaatgaaaagatcatcaagaatctccaaagactatactgtggccaaaagcagaagaggtagcatagccttgaggcaaggctgtgaatgtgtactgttggctctcataggtaaaagcaaactgcttcttatagtccttaaaaattgatctagaaaaaataaagtatctgccaggtcaatagctgcatttgaggtgtcagagagtttgttgatttgcttaagcaaagatagcatgtcaagaataggggctgcaattcacttcaccacctgattaggtttatagtaatccacagccattctccaagaaccatctgcctctacatggccaaagaggaaaattaaatgggagatcattgtatttaccacctctgcatctttcaagtctttgaggatggcactcatctctgcaaggcacctaaaaatgctatcctggctaggagggaaattatccggggattccacttgggccttactactataacagattttactctatgagtctttcccattgccaggaaacttggaaaacagctatagagtgtgtctgcaggtctatggggtccactgtgatttgaagttgggtcaaaattccacttattatttgacttctgtaaagaaatcaggcaagaggctatgactccatagtgatagtttgtggccatcagatctggagtttttctattacgtaggtagatcaaataatgttttgatacattgcccatctacttcatgtctgaggacatcataatgaataagccattgctaaagattccctgaaagtcaaaacattgtaattaccacttcttttcttctggaaaacacggcaaatatgcccatcttgtcttcaggggataaatgctgtcacatgtcctcatcctcactgatatctcccacctggcatctcccccggcatctccaccgccctgcctggcccattcagagcagccaccacggagatttttaaggatgcaggtgctccctccttagcatatttctcgatgcctaagtgaacagagtgtctgtcagcccctctgagggcatgtaatgtgctgggggagtgatggtgcatgtcattcatggtaaagccactccaacattcctatctcccgaaccctttggatattttcccttacattgtgcaatgagcattctcctatcccactcttattaaatgagggctgccactgggaccaagtgtagttatcaaccaagtaatcggagccacttccagccttaacgaacttactgtgaaattcagaattcctagtaagtgcacccatatcaatacctttaccatgaggcagtgttatatgctgacctctttagtctaacactcttatcatctattcatacacatattctgcaggtttctgctaatgtaaattagcaagatctttccaatgttttggtgtatatgctatttcctcttagggggactttgtgctggtccccctgcaataggctgatatctgaccctagattagtagcagcaaaggtggagtctaggtagcttctttcaaggcagccttctaatgaccttgtaaggagacacgggagggaggctgcttctacttggttccttttccattaaaaaaaaatgtggttttcaatgcccactatgaaggcagatacttagtaggtttataatagatactttttaaatgaatgaataaacaacatttttttttctttgagacggagtctcactctgtcgcccaggctggagggcagtggtgcgatctcgactcactgcaagctctgccattctcctgcctcagcctcccgagtagctgggacgacaggcatccgccaccacgctcggctaatttttttgtatttttagtagagtcagggtttcaccatgttagccaggatggtctcgataaggataagggccaagcatttgaaattctattttttaatttataataaagtaacttccaaaattcagtctttccccccagttaaacctcatttaaacagaacacctgtctacctcctaagaagctcctactctggctcagtgggaagcccctacagaccaggctgggggctgatccccccaagtctccacatctggaaacatgatcccttgtacctattaggtgctcagtagatgtcggctgagtgaatggatgtggggattttgcctccagagggcttttccagagctacctgtatcagctgggcactggtcacacttcaccttccttctctgggttgcactcaaagagataaactgatcttactttcctggtgaaaatcctcttccgctcataaactgataccattctagtgaccaacagctagccgaccatgagtgtggtgggttcccgctgtcagatctcagggctgaatgcaaatccagccttgcctcaatggccctcttggtaccctcatcctctccagggaagcagctccttcccaggcaccctctataatcagtgacagcatagatgattggttgaggccttagcacgggtaatacagtcaacatcactggtgccaacctgagagtccctcctcgccttccaacctgactcaacccctgtgtggtccaagcacttgggagccacgagtttcagaacacaggctctgccccagcccccggacatgaatcttgatggatccaagccagagttctcaactttgtcagacccatgacctcttccaaagaagaattgtgcttaatgtctctttactgccctgaaatgaaagtcataaataattaacctataacatcatacacctacttaaaaactcattacaatgccctaagtggactataaaaagaaataaaaggacaataatttttaatgaaataataacttgtaataaattaaatcatatttcaataggcaaatgaacagacacagacacaggcacacacagagatataaccaatagttagatcctagccaacttctacagaagaagtttggatggaagagaagatcaggagttgcgctacaacagaagggcagaaaaataaagacacttgaatataaatattatattcggtgtacggtaaaatcttacaaaaatatcttgttttgatattaaattgatgtcggttctaggctaagatgattaaatggctcttcacacaagagcgaccagaggagaagtgaaattcgtgtgggaaacaggacggtctgtcttatgtggactgtcctgcgccttggaggcatccagcattcccagccccacccagctgaatgccagcaatattaccagtcattgagccaagccacccccacatttccatacaacctcagaggctgtacctctctggtgaaaaagcactggccaaaccatgataattccacttcctctgccagcaccaggcctaacaatgcgcttgggatgcaattttggccaaagttacaggcaatccaatctgctgggggcttctgggaaagggttccagtctcttataaagaggcactaggaagagacgcgttctttcttttgctttcacctcttgcacaagggtgggacgcctggagctgtggcgcaatcctacgagcttcagagtgcaagcctgagggtcaggccaatgtggagagcacagtgggaagttgaaaagaatcagggtccctggtgatccccacctctgtaccagccaaaccagaagtgctaggaagtccactggatttcttgattcatggagacataagatattgtccctatgatgtaagaacaataggatacttattgtggatttctctgctgcttgaagccaaaagcatcccacctgtgacaggtagagtctttttgcttattaccataatcccttctacttgataagcaaaacctttgaaatgtgcaaagcgccagactaaccatcttatcattggaacctcactccctgtgagttatggattatgatccccatgtacagacaggagcactgagaccagggaggaggggaagtgatttgcccagcgccaggccctgtgttgccccagggcagtgctcctcctctcccccactgcacccaggaagcctttgctattctgtgatctgatgcctctttgggactccatgctctaaatatctaccccaccctcatcaccatttcacattctcattcttggggtggcgtccctggattgaagaactgtgactctcggcatttcctactaaaatatgcatatctcatcttaaaagaactaatacatattcattagcacaaataaattcttcattagttctcagatatggcaggctttgaaagaaataagacatgagacgggtgagttttgagctgagttcattcatcgtgccagggtgagctttcatttactcattcactcaatgaatatttaggaggcacatcctatgtgctggacactgggctatgtcctggagccacagcctcctactctccatggctcctgccctcatggagctggccttctagtgggatggcacagtcaaaaccataagcaagataatcgcagattcgataaaccccaaggaggaacttgtacagcctgatggaatcaaatgtgactccacagggactcccttagtcagggcggtcagtgagggtcccctggtggaggagaaatgtgagctaagacccagaggatgaggaagccagccatgacaagatctggagggagagcattttaggcccagcaagtgcaaaggccctgaggtgggcatgtgcttgatgccaagtgagcaggggagggaggtgtgcagtgaaggtagggaccagatcacataggatcttggattttatttcaagagcaatgggaagtcattgaagattgtagatgacagagtggcatcatctctcttgcactttataatgctcgctctggtggctggaagaatggatcatggaagcaagcacagatcgaggaggccccataggaggctgtctcagtccaccagcttggattaggaggtcatggacaaggtgtgagccatggatggaacttggagggcatgctgtccatgggctggggtccaggatacaaggtacaagctgcactgcacaggactgtcttgtgggtgtaggcatcaggactgggaaggcccacaatgggacaggccctgctcccactgcagcacgggcctgtgagtatggcccattgtgcccggggagcctggcatgagggaagagtgacagcatgcagagcgggcagcaggatcgaaagaggccagagagaaaccctgaatccttactctatggaggactggaaactcaggagggcactgtcagatcaggcagaggacccggtgacccagggccagaccggactgtgtgccctggaatgttctgtgccccgatgccacttcctggatgtgcaggatagacactcaagagttcactcaaaagcaacaggactaaggagcattcctccacccaggctctgtgaacacctctgctctcagggcagatcctgggtcctggattctgtgcccagtttgtgggttttgttttttttttagacggagtcttgccaggctggagtgcagcagtgcaatctcggctcattgcaacctccgcctcccgggtttaagcaattctcatgcctcagccacccaagtagctgggattacaggtgtgtgacaccactgctggctaatttttatatttttagtagagatggggtttcaccacattggccaggctagtctcgaatgcctcacctcaagtgatccacctgcctcagcctcccaaggtgctgggattacaggtgtgagccatcacacccggccatacgatgcataatctatatgatgactgtgtgtgtgtttactctccaggtaagaggggaggaaataataataacagttggcactcactgtgcatttacaatgctggaggcatttgctaagcacttgaaccagctgattgctccaagtcccacgataaccctgggagggaggtactttcatttactcccctttgacaggtgagaaaactgaggctcagagtggtcacgtccaagaacacacagccagcaagtggcagagctggaatctgagccgaggcccatctggcggctcctcattctgggatcaggctgaagccactgtggggcatcggtggtgacactgagggctagggcaggtgtgcagggagcagtggcccagcagctgtaggctctgcgccctctgccacatccagccctcagagcacccattcagggtcagaacccagcatagactttaatcccgcagttctggcagctggaggggaggggatgcccgtgggcagaggttctgtggaattggcagaacccttccccaccccacactcagccacaggcttcatcctctcatctcccagctttgtctggaatggtctcctctttcgagtaaaccctactgattctgcctaattagctcttcatatgaaatccccagttactctgggagcagcctccatggcggatctccctggagcacggaggtggagacgcaggcgaacacacctctctgcaaactgaatggatgcaattggtccccagggcctgagtctaacatgggccctgggcctcactttcccagaaggcctggattcctaaatgtgggagtcaccttcaaatgaggctgcgtctagagtctcagagaaacgaggactgtgaggacccagtagcccccttggggcagtcacccacagcctggcgctgatcaaaggctttgcctgcccctccaaccccgacaccgggaacatgcggttgggagcccatgctgcagatggggaaaccgagacacagacgagtcaagtgacttgcccaggaatccaaacccaggaatccggacccagggagtccggccacaaagctcaggcactgacccacgagccctaatccccatctttacagccccctccttcccgtcctcacgcccagatgcacctgggatgaacgtacttttacaaagtcaatgtagttcttatttcctgaacagcaccacgataaagagttcgtttgttccttcaacatttcagccagcccgtggtttctatagccctttcttggcattccttcacttttaatacactggaagccccaagagggaagccccctgggtctttccttggtgacctgcttctgccagcagcgagtggggctgcgggtggggacccaggacctgggacaggacaaatcccggctcagaggctccttgactgcgtgcccctcggggagcgccttcccccttcagctccttcagctccacagtgggaggacagcgacaaccatggtgcccccctagggctctcgtgaggattcagtgaggtgatgtgcacagcctgcgacacacagtaggggttcaatcagcaccaagcatcagtgtccctgcagtccctatggggcacggggatctgcctcacctgttaatcaggaggaggaaggcgagtctttccttttctttttggagtcagtctctcactccatcacccaggctggagcggagcagtggtttgatcatggctcactgcagcctcgacctccctaggctcgggtgatcctcccacctcagcctgggaccacaggcttgcaccaccaccccaagctaattttttttctttatttttaatagagacagggtctcactatgttacccaggctggtctcaaactcctgcgctcaagcaatcctccagcctcagcctcccaaagtgctgggatgacaggcgtgagtcagggcacctggctctagactttcgtcgacgtcctttctggctcagacattctgagcctccaccatcgggtagggtcagaccttctgagcctctgccatccagacagacccagatggatcagaggagggtgcgagggtgagggtgaggcagagtgttcccagtccctctttatggccaagactctgcaaacaggacatggatctggcttggataggacacagatgtgacagccctcatgtctccccagcctcagtgccccaggaccccctgccctcttcctgacagcaggggatgtgagggaaggagggcagccctgcatcccacacccaggccccctcccctcccctgatacccagcagccacgggtccatcgtcttccagtgtcagccacgcaccatgaaaacagataccacccaccggggccattcctgtgctgtttttcaaagagctgtttgggccaaaagccagcaatgcaagtctgtgtgccctgcagggctggccctcctccagctcttcatctctgaacctcctgtccctggagcagctcatctcagccctgccagtgtctggaaagtgcccatcatcacctacagctctaggagggctctggcgaagcacaaatcaggacctgagagcatctcccgttacccatcagccccgtggcggtgacatgtgtccagcaggcagcagagccactgggaggggcacagggtgggttggctctgattggagcggacatggcaagaaggatctggaggtggaagccagggcagcagggccagctgcagggtgggggtgctcgggcagcccagcatggggaactggagcctggaaagtgctggaagggaaacattgcaggaagcaggaggacagggaagcacccaccccacatgctgggcagaggctggctagggacccgccctgggagtggatggacttgaatcctgggcccctctgctgagaccctcaggacttcgggatgggaaaacagaacagcacagggccgctgcagtgacccagggagaggagctgagccaagccaccctcacgcacccaaggacctgcccctgggccacaccccagacagagccccgggctcagggtctggagccacacggcctgggctcaaatccagccactgtccttgtgagcaaactttggctgcaataatgggaggtgcagctggtgaaggcgctggcagcggaggcatttccttagcatccctctcctaaccacccctgccccactccagccctccagggaacgctaccagtgcccggagggaggcagcttcaggcttggctttcggcctcccctgcctgcaaaccccgagctccaggcttgcagtgggagcctcccaggagctctgggcaggaggcccgcaaggctaggcggggcgccctggcccacagcgccatctagtggccgtcacttccacaaaggtgcaccagtgactgtgggtttctggtcacaagcttcgtaagcaccccgctttacagtgcataagggcctttcatatccttctcctccaatcagaagagaggaagggaaaaaagagaaaagagagaagggaaagatccccgaaaggaaagaattgaaaaatcgagtcaagctcacagacatatgttatgggacaaagacaaatatagaaaagcttagagagagagaaagaaaatgagggggacgaaagtaagaaagagacaaattttaaaaagtttttaaaaagagagaaaaaaagagaaaatattcacggcaagcccagcccaggagagggatagcgccagtgcccattgtccagacgattccaggccccgcctccaggctggctctgtcccaaatacctgcacccaggagccagccttcggtctgagtgctggagcccggggaacagcagcctctgggcactacgcggtccccagcaccacctgctggacagacagggcactacacttatcccgggaagttccactttggggccctggaggagactcctggtacccccgcaaggcagccaggtgggcgtaaagtctccatttctcaaagaaggaagctgagggtcccagaaagacagagaatctcagatatggccactcagcaagtatcaggtgttgacagattcaggagcaggcgagggtgtctgacttcaaaggtcctagtccagccccccatgaatgaacccacgtggcagacacagaggttagaggggcccgcttggccacagatgggtgtggcttgcgccccccgctctgatcactgtgctaaccctgctttcttctattaatatttagccgtgattcaccactgtctggccctgggctacagtatggaaggggtgtggttcctgctcttactgctggggggaaggtggacaggaagtacaccaacagttatttagataaaatcataaagcggtcaacacaccccatcgtaccttccacttcctgggtggcctctgttgcagtccacgccaaggggccatctctgggtcagcaccttttgacagatgaaaaaactgaggctcagaggaattcaaccacctgggccctgccctcatcctggaggagcagagaaggagaggctccgagagacgtcaatgcggggctgcgcctgccccttgattctccattggacggcacagtgactccgggtcaccaggtcctccccgagctgacatcgccatggcaagtccagagctaaggatctggccgtcagcgtgagcaggccggatgagtgctcggaccacgtggctccggggagctggagagctggcaccctcctcaagaagacagccgctcctcagctccagctgacatgtagccaggtgggaatgtggaccagtgtgaccagagcttctgattttttctttaatcttttttttaagaggcaggaccacactacgttgcccaggctggagtgcagttggctattcacaggtgtgatcaaagcgcacgacagccttgaactcctggtctcaagcaatcctcccacctttgcctccaagtagctgggaccacaggtgcgcaccaccacacccagctcagagcttctgattttcgagacaaactaaaaatcagaattcagagatgaaatttgctggttcataaatataattcatttttttaaaacaccatatcaggaaggaagtaaaaaaaaaaacccacatttagttccaagtttcagcctggagccatcagtttgagacctcttgtctcctgcaaaaatgtccgcttgctctgagaggcccttcgtgcttagttttatacttggagaaacacatctcggagagggaggtgggcccggctctccctcccaactctgcaagcacagctctgagcctgtaaagtatgcaacttgctcaaggccacagagagccggctggaaacccaagctgctcctgcctacggccccaggagaatgtatgttccttctgcgggcccccagggtggaggagaggctgaaatcgatgctttctagaaacgtgtctgcctgaaggaagacgtccaatcctccctgttgacctcaaatatagattgaggtaacaggtcttccctcgaagtgattttccctggatccaaacactggcctcagataattctaaataatcaatccatgactgtgcctgaaaccccaccaggattccctcttgcctgttagagtattgagtcctttgaaacctgtaactgagagacgcgaggatctctctctgggagggatccaatctgggccttcagagaatgtaatctgcaacaggttagtttggaaggaaaagagactgaaagagaaggggctcgagtgtgaaatggcagggctgggtgcagcaccatggtacaggggagtcccaagggtggccatgacccagaggaaactgtcatcgatttcagcattttccaaaggattggaaatcgggaaaagatggaataaagaagaggccatacgcaacataccgaaacccggtctctataaaaatttttaaaaattagccaggcatggtggtgtgtgcctgtagtccaggctacttggtaggcagcatactgaaacctggtctccacaaaaaatttaacaaattagccaggcgtggtggcacgtgcctgtagttgcagttacttgggatgctgaggtgggaggataaattgagcccaggaggtcgaagcttaagtgagtcatgatcgcgccactgcactctaccctgggtgataagagcaaaagaccctgtctcaaaaaaaaaaaaaaaggacgagggggcacagggctggcacagcagaacaggtctgcagcccagggaatgaggtttctctgactatgcaaacaaacccaggcagcttcataaagatcacctgggcccaggcaggtggagaacctgctgacagcctaggatgcagccaccaggcccaggtgtgcacgcagactctctattctcattggtgcatttcacgtctgcccaataggcctgtttgtggccagcgtaagttctggctgactgggggtccggcacgaccatgttgtgggtattttgaactccactcccgcctggatccaacaggccttgcaggttggagcgaggaggattctatggcaccccttggatccacactgtcccctcagcacaagtaagccacccaggaggaggtgtggaattcctgggaaaacagtcactttttcctaccttcacagtgaaatgggagctcagaatccaggggggaaaaaagctgaaatatcaaataaggcctgttattttcctgtatacctgggttgcaggcaatccgtgcaacctcgggtcgtcctcagcaatcaccccgcgagagaagctgcatcgccccattatcaaggaggaaactgaggcacagagtgaaaacatcactgacttcggggtcgctggttcaaggccccgatgcagagatcagcactgtcctccatgaggcttttaaagcgcgagctcatcccctagtgcccccggccgcacccaccccccaagccacccaccgcagatgaagcagatcacagcctcgttctttgtattataaactgacttttaataataataaaaaatctatcaagaatttaacgagaagaatctgtacattttaaagtaaaccagtgcacaatgcgctggccctgggccctcccccatttcccgcagcagggctaaagcgggtcctcctttgtctctgatgcaagatacagtgacaaggccactgcctgccctcgtgtatgctgcggcaagagagggaagcgcaccctggagggcgggaggctcggatgccagatgccgggagggcttcaagctcccaggcctgggggcagcagggagcccccacctgaactcaccacctgccaggggtgacaggcgtccccccgcttcctccccagctgtgacctttccctgaaggcataccgaagctggggggacaaactgccgagggggcttgtgtgggtccctcctccccagcaggcagggtggcttcctgtgctctggctggtgatgtcccaatcgccctgctctgagaagttaccatcaagaaaataaatcacagaagccaccgcccggtgtttcccagtgaccctctaacccgtgtgacacggcacctcaggtggggctccatcccctccagctccaaccctggctggccacctctcaggcccttgtagccagtcactcaaagagagcgagttctaacaccggccaaccgctggagaatggagggtgggggaaggaatcacagtcgatacctcaaaacgacaccttacaaccctaatattaacaaacaggaaacaatgacattttttaatttttcaataatttagtttttcttttgtgctcttttttttttagtagaagcaggaacagttgtcaatactaccttctgttggtcccctgttagacaacatacctttctttgaaatgtaaaatgtcaaatatataatcacacaactttagaaaaaacaaactttgacaacaccaacaacaaaaaatcccaaaataaaccagagatttcatgccatataaataaagtcagagcaaatctcgtgcccagggctggtggccccagttccaggggcggtgatgtccagagctggtgtggctctcggggatcctctggtaacaggcgtgatggaggccccgtctctcctttcccgacagagccaagtcttttccaagtccaccaagcaggttagtacagggttagggtgaacctggaagctaagatgaggaggaggagacacgtgtggtcacctggaatgtggacgttgaaggaaaccggggtttcaaaagtgcaggcggagccatcccgagggagccgggtggccccatgtggcctccatgacgttcccttgggttctggggacgcaggagccgaaggccaggcaccagctgctcccatcagctctatgggtctccagcacccctccagcttctggcaggcgtgtgaagaatgggccggcccagggccaatcagccagctcgtcatcacagcgagggtggccaggcttgtcccggaaggaggcagggaggacgctgggcaggtcccggaacgggcggctgcggaagccttgggccatccctggagaaggccagcgctgcctgctgtgtcctcccaaatcccagctccagaggccgcggcccagcgtggggcatttgggtgttcagaggtccccatccaccggcggctggcagaggcggtagaggctggggatggaggcaaagagaatgaggagaggccggggcgggccaggacctatttgtattatttccatttttacctgaacatgtaattcatgcccagaaacccaaactcacaggtatataaaagatgcagagaaaaatatctatgctgtccatgccttctgctgactgccaggcccctacccacaggcagtctctgcccactcagagactggcatttacaaatgaagacgtgtctacaggtgcacgtgtgcgttcagccatgtgggggtggggtgcacattccacactagtgggggccagatggccacagcactctgccccttacgcagtttcacttgctctatcctgggaaactctatatgcagagatggttttggagccgggggaccagacaggaggctgcgtggtgtccagggcaagcagactgcaatgctgcacatgtggtctgatgtggtcagcgctcggactccacgcccagactgcctgggttcagaatcccagcttttccatttactagctgtgtgacattggacaagatacttaacctctctgtgccttagcgtccccacctgccaagtggggatgacagccggacttggctcacagggcagctgtttggattaatgagtccacagaggggaagcaattggacagtgcgtggcacagggcaaaggccgtgaaggtattgaaaggaaccacgtgccactcgtgagacacaaacaaggtgtgtgtggagcccccagcgccacagcacgcacagtgactctcgtcaccactggcagcaggtgttgccggcgctctgtggttacgtaagacgttgccgctggcggggagctgcctgaagggtccatggaactgtggactatttttacaacttcttgggagtcacattatttcaaaacaagagttatttaaaacttgtgggcagatgacgacagcaaactagggctgtggagatggagagaggatcagacggaaacaacgtcatgatcctaaagggcctacatgtggcaccaagaggaagactgaaaaccacatgaagagagggcagggtgggaggacaggaggaaacagcactccccatgccaaagacggcaggaacagagagcattcctgcaaatcaggcatcgcaggcctgggcccaggctgctgttcagttcgcatttctgtaaatggctaaaaggttagcttaggttggatcagctaaaatcacagaattcttaattccaccccaggttaaagcgagccgctcaggggtcagggactcagggtagggggcacggggtggggggcacatggcatgggacacagggtggagggcacggggcgggggctcagggctgagagggcatggggctgagggcacagtgtagtgaggtgggaggatctcatagagtcaccgcctcacggcacacctgggggctcatcttcccggtgggagcaggagctcctttgggaggtgacaaagttgtgtctgttgctcctcaaagaggttccccataaatgagaggggaagccccatctgagcattaggggttaggccaggagcatgatgccaaagccaggcctgggtcgccagctgggagtggacaggaaggggcggacgaggcagccactcaccgcggagcaccctggggcatctggtccttgactcgcaggtttttggccagaatctccacccttgggccctggaagaaggaaccatcaggcaggggcctctgcaggttcagggcacgtgaggaagcacactggggggtgggggtggggcccagaagcccaaggacccagaagctaagatccttgctcccctccagattcagagaaggctcaggtctggggctggtggctaccagcccctcatcccaccctggctgcaagcatgccacgccctcagcccagggtgctggaggaccctgtggccaagcggcctcacctgcttccgcatgatgtccgtggcctgcatgatgcacttgggcagcaacccgtggctccgtgccaagatggccgcctgctccagggacacgctcagggtgctcctgcagcaggggagggaggacagcgggttggcggtggggggacaggggtcgggggaggacagcgggagtcagaggacagtgggtgagagctggggcaacttcctgtccctccgaggcctcccagacccaatcctgaccatcacggcaacgcctcctcctgccgtccctccccgcttgctcctcttcctccaggcagccaccaccctcactggcaggcactctggtgcttccccgtctgcagaagccctgttgagttccctgtgacattcccagtgcctcgctcagaggaggactcggtaaatatctgctgagtgagtgggggactccctgggagcctcacgacttgtcggctccgtggggtttgagatggacacatcgattcacacctctctgggtttctcaacagttctagaacgtggattctgcagcaagacctctaggattccaatcctgtccctccatgtaactcctctgtgaccctgggtagctgagttaacctcagcctccctatactattaactatgaaacagggagcatggtggtgcacagaggacctggcccagctggaggggctgtcctgggaaccacaggaagctgagcagcatcccggcctctacccactaaaggccaggagctcctccctcccctaagttgtgacaaccaaaaatgtgtccagacattgccaaatgttccccggggataaaactgcccctaggtgagatcccctaaaataggccccactactgcactggtagagaaagacggaaaggagttaatctgcatggaacgtcaatgacctaggaggcagagagcactggccccgtgaaacatttattcagcaaatgtttcttgagcacctgtctcaggccaggcactgctctagcctctggggaacagcagagaacaaaaggggcccctgccctcccagatccagccctgccctgagggagccaaggaggaaataaataccccaatgaaggctgtctggggagtgggggtgagggctgcagaggaagagagggttgggagggcactgagtggggagagtgggcacagtttgtaacggaaggtcaggaagcactctggagaaggtgacctcttcctccctgggatgagcactggggacaaaggatggaggtaggaggcaggggagcctccagtgaggtcagcaggccccataaaccagccattgctattgttaatgttgaaggaggcttccggcggaactacagggcacagctctcacacacactcactacggcgttagagaagcaggtggctccacagccctgctaggaccacctgctgctgccattccgtttcacagacagacaaactgaggtgcagacagagccaaggctctacaggcaatggcagaaccaggattggaacccagccttcctgcctccttgccacaggaccccaaactgaccagaagctaggccagcccctccccacaccccgactcagcgggcagcagctcacctctgcatgcctgtgccacacatgaccatctggcaggcccccaggcggtagcagagctccgaggagatggggatgaggccggcgcccacactcccagcagcaccaggctttgggtggacaaaggacttcatgaggcggcagagctcatccagggcattgatggggcggatcagctgtagggggtaccacacataaccggggagttggaggaggtcctcacagcccctcagcccccatctggccctcctcccccaccatatccttctaatccagctgttcctgcagctgcctcccagctcacccctctggggataacaatgcaattcaatcttctataacctctgctcaagaaccctctgtggctccccactgccctacaagctggcagtcagtgttgaccatatatttcaggtctaaccttccaacctaattctcttcacctgcccaggtgtgtccccagtgaagcctgaagaaagtgccctctcccagcctgtcaagaccaacacaagcgccccctctccagaaaaagccttcccttctgcccccagcattccctgacccccacgtggaggtgcaaggggtggttcactaacgagctgtgctgcggggacattctgccagccagagtggaaagtcccaaacggctgtgcccaccctcctcccggagcccccagctcacagccccaagacagcaccccaaaatcatcagcacattcaaggcctgcctgaccctagaaaaccaggaggccaaaagacatgtgttgagggtcagaggcaaggagcccaaggagccgaactatcgaggcccctcagagggagctgctcccagctcggagcaacggggacatgtggcaacatggtccccaacagccagatcttcccattcctccagaaaagctggaagcctctgtttttatgggaaatcttttgatttctaaaggttgacagcaaatttgaaacacataaacaaaaagaataccatacaggttacatctgtcatgaggtccaggctccagcctcagagaaatgctgtggttaataaggcggattggagtggcagagatgggcggctgccagcgaaaataaatcatcccaggaagttgggaatggggaggaagctatcatgggagacttcctggaggaggagagactgcagggtctcaagggctttggggctagaatctgctggggcacaaccctgggcctgtctgctgagtcctgactcctgagcgccccaccctgcccaagctccctgcagcaggagggcacgtggacatacctggtctatctttaccgccgtggtgctggcatccgtgggcaggttagaccgctccaggtaaaatgccctgcgagagaaagatgggaatgaggcgggggccaccacacccaccatcctcctgcccctacccaggtctcaactcctgcagccaccgtgactccgccctctgccgactctcagaatgaaatccctgagagcgcctgcaggctgtgctcacccgcaggcacctgttcctacaacagccgggggggaaagaggggcctcctgagcactcctccaatgccacccctccctgcctgcccgtccacagcagcccccagccctctgctccccaggccctggtcctgctttttctctcttctgagcacttctcaccacttggcatctcatggctctgggcttactggtttactgttcgtctccccctccagaacaggggtcagcgaacttcttctgtgaagagcccaacggtaaacattttatgctttgtgcactggaaagtctcgatcgcggccactcagctctgccattgcagcacaaaagcagccacagaggatgtgaaaatgagtgaatgcaggtgtgctaataaaactttatttacaaaacagggagacaaggagggccagattttgacaacccctgctctagaatatatgctccatgaagaacaggactttgttttgctcactgcacattcccaaacaagcacccggaacagtgcccggcccgcagaaggcctcaacatgtgtgaatgaagggatgaatgaatcatcacacaggcaggactcagagtattccacagatggcgcagaacagactgatgacagccctgatcaatccaaacagatgccagttttcagtaactgggctggatgctttctctgagcaaacgaatgaagcctcattctctcatttccaaatgatgaagcccagacccgtactcatctccctggggtcttaattctcggcctgcctctgtcacagagggaggtggtgagacacacgcaggaagggctgtgggggagggtggtaggagtgggagctgcagaacttagaagctgcctcccagaacctgtggttcctcctggtgatacctggctcctgctctcacccctcctcccctggggttctcttctgagcagccaagaccctgggagccgcacccctcactcacaggcccaagagtcccaaggtcccctgtcctagctcccaccctctgtagaatgaagccggctcctctcagtaggaaagacccactttgaaaccaaacagaccccagttcaaagctcagccactgcctggctgtgtgaccttgggcaagtgtgtacactttctgggcctcagtcgcctcctctgtaaagtgggatccatggcctgctgccattgagaatctcacgcaggcaagagtgctgtcacacagaaggtgctcaagaaagggtgtgcggcccactgcccatgctgggggtccgcctggcaccttccatgctaatgcccactccacgtggaggtttcctgactcctgcccccaacggggaccccaggcggatacctgagtttgcggtaatactgctgaactttctccagggactgcgcgttgatgtcctgctgcaaatcctccgcggcctggctgcctggagaaggcagcccctccacgttctccagcactgggaggggagatgtcgggggcgggcaggcggttgggagccggtgtgcttggtggccttggcccggcccccgtggtcctccctgccccaggcctgaagctcacctttcgtgaacagcgctgtgtgcagcctcaggctggccccaccctccaggcgggagggcagcttggagaagtggtagctgtcgaggtagaagatgaccttcagcgcctgccggctgccctcaatgtggtagaagacgttggtgtctgcggaaggatatggggcaggatgactcaccaccgaggccaaggccaggggaagccctggcacacctctccagaacagctggcacctccctgcccccaggtccaggggggcaccctgggacctccctgttctcccgactctacaggggtagcctcagacctccctgccctcctgccctctagggacagcctccagcagcccttccctctcactctccgaagaactgcagctgacacctccctttcgcctgcttcatcagctcctagttccgctgcttaattcttgaacctgatgcggactctgcctacttagggggtccacagcatttggggtcagagcttccccagcgctccttgtaccctcacccggtagcccatggcccctgcctgggaaaagctgccctcaaacagggtatacatctgattcatagccagaaggaagcgcttagggcagggggtgcaaaatatggcacccagaccccatcctgcacccatggcagacatcactcatcgatcaaagctctgcccgagccaatctcagcctggagacaggcagctgctgctgcctatcaattccaattgctactcaaagagaacctgcccttcatctagactctagtccatgcattttcagcaggagagacactgtccccaaggaggtgaaaactggctcgtgggaaggagaatgaaaacactttcctcttttaatgtataataagcacagatgcacagataaacagacacagggtatacccgtagtagtataatttcatgggggtgcagcaattaggaaaaattgactaaaaaggttttttatgaaattaaataaaatctaatgaaatgaaaaaactgagaaacactaatccagtgcctggttcctaattaaacccacatgcctcagaagcccctggagggctttcagcatacaggcctctggactccacctccagagtttctgaggccgtagttctggctgggccggagaatatgcctttctatcaagcccccaggtgctgctggtccaggggccacgctctgagaacccctgctttcagaagcaagcccagaagttcccagccctggctgcacatccagactacccagcacccagaccccaccccacaaaccgatcagaatcgctagggcccagggccctgggatcgttgcaaagttccctcaatgattccagagtgcaagcagggctgagacgcactggtctagactatgagctccaggagggtaggaatgaggaccatgttacatggcccaaaacgcagcctgacatatactatgtgctcaaaattatggacatgtaaatagatggatggatggacggatggatgatggttggatggatggatggatggatggacagatgtttggatggatcgatggatgaatggatgcatggatggatggatgagtgggatggatggatggatggacggatggatggatggatgcatggatgcctggatggatggatgcatggacacatgggtgggtggatggatggatggatggatggatggatgcatggatggatggatggatggatggataaataaatgggtgggcaggtggaaggatgggtggaaaatagacacagagagaaagacagaaagaaaaagggagaaaggggagaaagcgtggaggaaggagaggtgaggacacgagcaagggaggaagggaggatggaacttaattatggtacttatttaagccctttaaaaatcttaagttttcacatctctagggaataattttattaagaattgggtaccagtgtcattctcttttaagagctgttggaaatagccgggttcatacaaaaagaaacccctctttttccatgtgtgccccaaagttcggctctcacactcatgttggaggcatgaggtttgacagcactgagtactgagcccaccttgggcagctggcccagaggcaggggaaggacagggtgaccccagagagctgtcccttccaccccaggaccccacctctcacagtgggggatgggagaaatcactcactggccacatagttctcgtccagctgcttaaaggagaaggtgacattgtccagctctgacagcgtcacccagatgtcctccagcatggtccgttcctccttctgcaggaagaagacagcgcggaggagtctcagatgccaaccctgccccagggtttcctatcaagatgctgaattcaactctagtcggcactccacactgtgggccccctgggtgccaggtcctgagcgtgactctccagagtggatgtgaaatcatggtgtgctctgtggcttgtcctgcactttcaagggtcatagaacccatctctgccttaattcactgagtgatcctagtaaagtcactgcctctcttgcctggatcaccaaccaggcttctaacttaacctttttgagcctaacacactcaaataaaagtccccaattccttcctcaacctcccccagtcggtcccatgtcagcaaatagcaccagcgttcattcggtcatccaagatccaaacctttgacttctcagtttctctcccgctcaccctgggcctggtccatcaccaagtctgatggggtgacactaaaacatcctccagacccacccatctccctccagcttcctggccaccacccaggttcaagggtccaccatctcttgtcaagatgacaccaggtttcccttctgccactctctgcccccaaacaatacatcctacaagtcatgttttgaaaacttaacccaaattatatcactcacccagctccaagcctctgaaccctccactgcttccagattaaagtctcaggccctacagaactggtccccacatctccctagcccctgccgctcccctctggtcacaccagccactcttcggggcctttgtacatgctggtccctctaccccgcacactcttcctcacactgtctgcctggctggctgaggtctcagctcaagcgtcaccacctcacacaggctgtctctgacagagaagctgcagtgcccgccaagcttcctgtagagattgccttctccccaccttccttccctcctctgtcctttcttcttctcaagctgcttcccccaactaggaagtcagcttcaggcccccagctcccagctcagggcctggcacatcgtggtgtttggagaatgaaggaacttggcccagcatccccatgtgagaagaggaaggggagggctgagtgttccctgcttcctccctgggccccaggttgtgcattctgagaatcaagtgatggccaatctgtgccaggcaggcgtcttgtgcagcagcagccagcagagggcgctccaaggccaggcctccccaccagccagcagcaggggctccaggagccaacctcagaggcactggtgactctcaggtcctggccggatgtccagcagcatccctggcttccaccaccccactcccacctcaggccctcagttgtcacaaccaaaaacatctccagacattaccaagtgtcccctagtggggaaactgccctgggctgagagccgctggtctgtagcatggattctgttatctgtgtgtgtgtgcctccctccctcccactgggacagaagatccctgggtacagggactctgttttgttcactgctggaccttcagtgcctataaaacagcacacaggtgctcaacaaatagctgctgcgggaatgacgaggccagggggagcctgagtaagtgggcaagggctccctcgacccggcctgggcgggcaccagtgggtgggccagcggggccgccctcccgccccactcactcaccactgtggctggcgagagcagggactggcagtgcagcaggacgcccgtggccgccacctgctccagccacttgcggctggcgtcgcggctgctctcctcgtactcgccattgttgttgtagcggtagcccagggccgccagcagctgcttggagaaggtgcacacggcggccaccagggcctggcagaagatcgcgtctctgcgcagctgcagctccgtgtctgggggcagagggcaggaggccttgctggaggggcgctcccgtgccaccaggaggcccaccccccaaaaccctgggtccaggacccctcatggaacccccagcaaagggctaacatcaggccagaaattactttttggtggacatcccagccaccaaaagccaattccacaaaaatcaattctacgaaaagcaagcccatttgccaaaactgttctctcagtgactcatctgcctgctttgaaaaccaaacaaacaaacaaacatcttgtgattttcctaagggtttcccaagaccctcaccctcagccatttctcctctcattatgggattccttggccttggccagtagaatgccaatggtgctaagctcttctgccaagctgcacatgttcagaaatgcagtttagcattttctctattttggagaactatgctttcttccttcccccacctctgcccttgcccctgtccttgaccttggcatggtctgaagaactggccagtttcaagcaattggtctctcagggtcccaatcttctggaaggaattatttccaatggccggcttctggccagtgagttttttagtgaccaaatttgacccagatcctgcagtagcacccccttggctaatttctagaaagaaggcagggatagagaaggtctccaagattctcccgctacctcctcccccttcctcttccccactctctgctgggtggaagcccccaggctggggctgaaggctctaccggcacaaggccccctaacatcgtcctctatcccggggccccgtcaacatccacccaggcctgggcagtggcacaggacagggctcctggctccagtgccctgagacttgtcccttggacacaagaggaagaagcaagtttcaagtagctcttggaggggctccaggccaaagcgttgcctccccccgtccaggccccgagggcatggatggtcggccttgggtggtggaagaggccgggtatgtgccccccacacacctttaaaggcctcacctgtgcacttcagcaaggccaggagcagctggttcttcccatctggaaggagaagggagacagaaagggggacgggctgggagggggcagcaagaggtgagggcagaaccgggcccctccccatggcacctcccaaggtgctctgacccttcacagcaaagccctggcacccaaggctgtgctcaaggaggttttattgattgtcaggtaaactccaggaacccctgacctcaggcagtggaaccccaactgtgagccccatctgtacgtgcaagcctgggacacagatggaaccagcccctttaatccctgggccacagcccctgccccacaccttgttcacataagtatggtcacacacacgtacaacctagatacacacgtatccatacacacacacactcacacatcaacagacacccaagtgcatgccacacacagagacacacacatatactcatacgtagactcacatatgtacacacgcaggtacacatgcgcccacacaagcacacagcagacacacaagtgcacaccacacacgtgcactcatctgcagactcacatacatatgtacacacacaggtacacacacatccacacagacacacaacagacacacgagtgcacacataagacacacactcctaacagcctcacatacatattctcatcctacatgggcatggccctacacacgccctgtcctgcaaaaaaagctcaattcttccaggcccaacatcctgttctctttccttaaaaaagatgctcctcggcccacaaaagggcttagaaagatgtggaagggctttggatttggtttattaggtgccttcttccccagggaggactgcaggactcagggctgggcagggtaagaacgagagcagctgcagtggtgcgctcttgtcaggactcaccacgccaggcaccacggcaggactcaccacgccaggcagccaggccagaactcaccacaccaggaagccaggccaggagtcaccacgccaggcagccagggcactgagcgcatgacctatgctgactcatttaatcctcctgaccacacgggaaggaggcagcactgtgggcccatttgacacaggaagaagctaaggccagaggcgtcaaggaactcgccatgatcacacagccagtaagtgggtgagctgggattcaagccctggtggtctggacccagagtcgatgctcctcactggttacacttttggagaacaggacagatcagaagcagcagagactccgactcagaggctgccattccccgagggaacagcccagagtcctctaatctcccactgtcctggtcaaacatctccctcgtccggatccttctaacgcaggagtctcagacgcaaatgccggcaagggccaggcaggtgatgtaagatgcgtggagcagacgccaagccacagggagtggtggagactggggtgaactggaaagcacctcggccccacgtacacagagcggccgccactcctctccaccaagggaggatgggagactgggcctagagtcaccagatcttcgtgttgttcaagagcagccagaaatccaagtttctatgtgagaacctttgtcaagctggaagcagagtcacagtttttgctgctgcagcatcgaaacctatctgtgggcctgaatctggtcagtgggctgccagccggtgtccctcataccctgataataacaggaactcacacatccaatgctttggaagctgagaaagaacaggttcagccttttcaacctccaaagtcagggctttgttttgttttgttttgtttctgatttttgttttgatagagacagggtctcactatgttgcccaggtctcaaactcctgggctcaagtcacatcctgcccagggcaggacactcagctgagagagggcatcacttctcttgtcctctccctggtcatggagaaacaggggtcacagaactggatccattcctgattctctcaggttccacaccaaaagccatggccccctccccaccatgatgcaccctccctgcccaccgaccttccacatatctctgaatgttgtccaccagggtcttgatggagttggggaggttccaggggtcctcctggatgctaatctggatcaggctccggccacggattgtacactcttctttctgtttaaactctggggcaggaaagtggcatgagggccagggaagggacggaggtagtgttggagaacggtggcacaaaggcctatgtcccatcacagatcccagagctcataatcctagatcaagggagctggcaggactcctgggcattatcgggtccacagagggtaagtgtgctatttcatggtaccacacccatggcaggcattattcatcaatctcagcactccttcctgctgctctgagaccaagactccccacagctatagccaatccagtgcagacctcacaaatcaatcacggctttcctttcgtctaagcctggatgttgtagccacagaaggattctcaggaactacctcctcatagccacaaccaattgagatggcacatgagttctatccctttccctacacagaggaggaagcccacacacagagtgggaaagtgacatgccttaagtcatgcaactgggcagtgacagcgctgggacttacctctggccccaccattcagaggccaggaagaaaaaggcccctgcaaaagacaaaggctctttcctcctgcaaggtcccagtttctgagatatttgtgggtttgctgtttctgctttctgaggtccatccctgaaagctgatcctgagacagcaggatgtgcagctgagctggggagccccaagtcctcaccacttcccaccctctcttggtggcaactgcccatctgcatttctatctcctacaatctacaatgagctccttgaggtcagggcagtatcaaattcatctcagggtctccagtgcccagtacaaggcctggcacaagctggttctgggaaattatttactggatgtacagaagcatgaatggacaggtagatgatgaatgaatgggtagaagggtgaaagagtgggcacacagatggaaggagggaaggatggatggatggacagacaagaagatggatggatggatgggtaggtgggtagatggatggatgggtgggtgggtgggtgggtggatggatagatggtaagtgggtagttgggtggaggggtggatggacggatggattgatgggtgcatgggtggctgagtgggtgaatggatggatagctagatgataaatggatgagtggatggatagatgggtggatagatggatagacagtgggagggtagatgggtggatgcacggatagtaggttgggtggatgagtagggtgggtaggtgggtaaatgggaggagaggtaggtgggagaacataagaaatttcaattccttttctctcaatcatttcaagaagaaagcctcaatttggtgttggtaagcccttaacacttctttaattcacaaatccctctcttaaatgaagaacaaagagcccttggcaggcaacagtgcctaactgcggtataatgatatttcgttgccgttgtttgcatttaatttatcattatcattatggtttatcatcaaattttggcatattatgctggcttttcatatatagggagttcaataaggtcctttcaaaattaaattttttaagagtgatactttttaaaaagtgatgtcaataataagaaaaaaatgagtatggtttaaaagacatgaaggaaggctgggcacagtggctcatacctggaatcccagcactttgggaggccaaggcaggaggaccacttgagcccaggagttcaaaaccagccatggctacaaggcaaaccatgtctctaccaaaaaaaaaaaatccaaaattagccaggagaagtggcgtgcacctgtagtcccagctacttaggaggctgagttgtgaggataacttgagcctgggaggtcaaggctgcagtgagctgtgatcataccactgtactccagcctgagtgatagagtgagaccctttctccaaaaaacaagaaagaaagaaagaaagaaagaaagagagagagagagagaggaaggaaggaaggaaggaaggaaggaaggaaggaaggaaggaaggaaggaaggaaggaaggaaggaaaagaaacaggaggggagggaaggggaggggaggggaaggggaaaggtcaaaagaaaaagaaaaagaaccattcttggctcagagcctacaaaaacaggtcatggactggatgtggcccatgggctaaaatcgctgtcctgatgatcctacagtcgttcagcagtaggagggcagagctgagcattagcccgggtacgccgccctgtctaacacccttccccatcgcaggctgtcaccttggactggctatcccctcaccttgtaagctgtggttcatagggaaatgcttggtctcttcgaaagcccggctcatgactggccccttgaggagagcattgatggagtccacctgggtggcaagaagcctggggttggtttgggccccgtggccctacacactgcagacatctgggacccacagcccccgggtcatgggccctccccaggtgtgacaggaggaacccaaagttgcgccaggagtggggcaaaggtcctacctggttaaagaggtgctccaggcagccatgaagcttgtcctgcttgtcagatgggatccgcatgtcacagggcagctcatctcctggcaggaggtagaagcagcagccatcagtcattcctgccccacctcacaccatccccagcactttcctaagagggggatacagctacagaactccaaacccacaagggatgtggagtctgaagaccaggtcctggctgtgagccacagggcaaatcacctgacctctctgagcctcagtttcttcatctgcaaaatggacaacaggcactaacgcatgacaagattgtaaagcactgctactgtttccattctgcaaatgagggactgaggaacagagaaaaggacctggaggccacgtctcctgattcctcacccagctggttcagttacatcagctgtcacacccaactccttcctagagccacctggggacagtttgtgcagttgactatcttatgtgatgaaatctgtatctaaagttcaacaatttcttccattttacttgagcttctttttcttctgttaattgaagtataattaaaattaaatttttatgcacagactatctctgaaaagacacacaagactgcagtgacagtgggaacagcagtgacagcctgagaaccaagggtgggggggagacttgtcaccatgcaccctccggggccttctgaattatgtaccatgtggatacacaacccatttgcaaaatgaactgctttaaagtctgaagtaaacaagactaaaataaaaaacaatttcaggctttcagtaacgcctttaatcccagcaatttgggaggccggggcaggcggatcacaaggtcaagagatcaagaccatcctggccaacatggtgaaaccctatgtctactaaaaatacaaaaattatctgaatgtggtggcgggcgcctgtaatcccagctactcaggagcctgaggcaggaaaatcgcttgaacccgggaggtggaggttgcagtgagctgagatcgtgccactgcactccagcctgacaacagagtgagactctgtctcaaaaaaaaatttaaaaaaaaaagctgtaagtagagtatgatctaatttataaaatattgtctatgtctgtctatccatccatccacccacctgcccatccatgcattcacaggccccaccaatgagctccaaatgctggcgagggtcatttctgggggagatgataagactctcattcatttttatggacttctttttgttgtttgtttgtttgcttgtttcttgagatggagtctcactctgtcacccaggctggagtgcagtggcatgatctgagtccactgcaacctccccctcccaagttcaagtgattctcctgcctcagcctcccaaatagctgggattacaggtgcgtgcaccaccacacccagctaattttttgtatttttagtagagacggggtttcaccatgttggccaggctggtctcaaactcctgacctaaagtgatccgcctgccttggcctcccaaagtgctgggattacaggcgtgagccaccacgctcagccatgggtacttctttgaactgctctgtgtcatttggattttcggtttacacatgtatcatttttacataaaccatgaggtcaccctgtttagttgtcagcacacgcatcacaacattcatcgaacatgaagtacacagaattgaaccgtgcatgcttccatttgctccatctccatgacattcacggagaacatcagctctaagagggcggagatgtttgtttctttcgctgccgcattcccagtgcccagcacataatatgggctcaagaaatacttgttgaatgactgaatggaaggaaatcaagtacaggaccatgcaataaaacacaaaacaatataatgcagaggaaagtataataaaataaactaaaactaaatctcatggggaggagcctctctccctgagcacaggccgctgccactccactcaccagaccccatctcgtcgctgcccaagtaggagctgttacttctcacgctggtgtaggacaggaccgagtctcgattgctgttacactcgctgcaaaggggcccagagaaggggctgagtcaccctgagctcaggccatctggtcctggcacccaaaacccactttctacagtgtagacaaaacccctgggccctcaggtgggcgtgcagcccagagagggcaccgagcaccggtcctgggtcccaaaggcagggaaggccggcctggtgggttttccacgcctgagggctgggaaacgtttctaggctctagcacagaaacacagaaataggaggaagacggtgaatcattttcacgcaggtgtcactctgtccagtgtccccaggggacagccttgccctgagacacctgcccattccacagggctctgtcttccgtctcctcagcccccagcctggctggaaacctcatgaggacagggactggattggattccctacggcccaggaactcggaaggtgtgggagatcaaaacccaggatcctgacattttttccttcacctttttgaaaattaaaggaaaaactggaggacccaaaaatgtaagaatgaaatcccagagagagggcaaaatctgagactatggacatgaggctctgggggcacaaagtgccgcagcagccagatacagacgccaggcgagcagccaacgggggatcaggcagatcccttgacgactggaagaacattcacgctgcgaggactggggggaaggtctgccttctcaaactgtatcagttctgatttttgcccacaaacagttgaagcaccctctaagattccactgtaaccaccatgggcaaatgtgatgtcacctttcactgggaccacagtgctggtttatctgcagtaaggaattaaacttacccattatatggcttattacaggaaactgagttttagtctatttaaccaactagttaggacctcactgatcttgttataattaaccagtagaaaatttagatcttctcaggttaggaggggaaaaaactgcactcttcctccttggaccaaataaacataaatagtgcttgtttcagaaaccgtatgtcttacactgagtttgcaaacacaccacagaatcttgcccttgtgcctgacaacatcgtgtcagcatgtgtggggtgacactgaggcagaacagatgggtccacgtggggacaaccctaaaatgtcagctttgcaactggggagcctaagtgggtcttccaggctcaggggtctcagataatcccccagaaccacgctatcagcaacagcaccctgagcccactgcaccctgagaagtgtccactgattctgatgttgccacgggtccgtggcctcacctgtccagggccatcctcatctaacctcagccccctgacggtgacacccacctgtaggagtcgcgataactcatggtgtcgtggcctgagtcctcctggtcctcctcggccaccttgaagcacaccttcttgatgcccccatggtcactcctgtccatctcgctctcttcactgaccaggggcagggaggaggcctcctcagccaaggatgcgtcgcaggacccacccgaggtgggctctgtgatggtggacagcagcctacggaagcaaagaccttgaagtcaaagatacaggcctggccctttgtgtcccttccctgaaaatcccaccagcagctgcaggtgtgagcactggccctcctgttgggggtgggagactcgcaagttctttcacggccaagctacacaaggctctaccagaaggtgaggcaggaagcctttcctgtgaagaccctgagagcaaatccttccacctcaataggctgtagggtctcagtgacaaccattcaacctgctgttgcagtgggaaagacctggacagtgtggaagcaaatgggcgtggctgtgttccaatgacaccttgtttaaaaatgaaaacaatcagctgggcgcagtggttcacacctgtaatcccagtactttgggaggctgaggtgggctgatcacctgaggtcaggagtttgagaccagcctggccaacatggccaacatggcgaaaccctgtctctactaacaaacaaaaattaactgggtgtggtggcgggtgcctgtaatcccagctactcgggaggctcgtatgagaatcgcttgaacctgggaggcggaggttgaagtgagccaagatcgcaccactgcacagagcgagagaacccatctcaaaaaaaaaaaaaaaaagaaaagaaaagaaaaagaaaacaataggctgaagtctggactgggcccctaggccatagctcatcaatccccactgtagggtgtgacggttaagagcacaggttttgaagctagctaaaccccagattcaaatcccagtattgccattcctcaagctaattatttaaactctcggagactctgtttcctcatatgtaaaatgggatcatatcagtatctatatcttaggcttctgtgacaattaagggagttaaaatgtgtaaacaggctaggcccagtggctcacgcctgtaatcccaacactttgggaggctgaggcaggaggatctctttagctcaagacttcaagaccagctgtgagaccgcatctctgtaacaaatacaaaaattagccaggcatggcggcatgtgcctgtagtcctagtcacttgggaggctgaggcaggaggatcacttgagcccaggagttcgaggctgtggcaacctatgatcacaccatcacactctagcctggtgacagttggataaagtgctcagaacagtgtctctgctaggcgtggtggctcatatctgtaatcccagcactttgggaggccaaggcgggtgggtcacgagatcaagagatcaagaccatcctggccaacatggtgaaaccccatctctactaaaaatacaaaaattagctgggagtggtggcgtgtgcctatagtcccagctacttgggaggctgaggcaggagaattggttgaacccaggaggcggaggttgcagtgagcagagatcacaccactgcattgcagcctggtgacacagtgagacaacatctcaaaaaaaaaaaaaaaaaaaaaagaacagtgtctcgtgccttctaagtgagcagtgatgaatacgcccagctagatgcaatcccaccacatctccacagtcagtagcatgattagccccatttgacaaacgaggaaaccaaggctcagagtggttaagtgacttgcctaagtttgcacagtggataagtagcagggccaggatttgaacccaggcctcctggctctagagtctacattctttttttcccttatcatggaatatttccatcatacacaaaagtagagagaatatcatgaacccaggtatccaacaggcagcttcaacaacagccactcagggtccaccttgtttcccccatgatccccatcactttttatttccctggagcattttgttttgttttgagacagggtctcgttctttcacccaggctggagtgcagtggtgcaatcatggcttactgcagcctcgatcttctgggctcaagtcatcctgcctcagcacactgaggagctgggacaacaggtgtatgccatcacgcctggctaattttaggattttttttttatagagatagggtttcactacgttgcccaggctggtctcaaagtcctgggctcaaggaatccctccaactcagcctcccaaagtgctgaaattacaggcatgagccactgtacccagcccactggagtatttaaaacaagtccaagataacacgtaattccaccacacctacttccgcaggtgtctctaatacatacagactttcttttaaacatgtggttctcaagtgggggcaattttgccccctaggaaatctttagctatgtccaaagacacttctacttgtcttaactgaagagggattttgccaccagcatctcgtaggtagagaccccagatgctgctgaacatcctccgatgcccaggacagctccccaacaaggaataatccagccccaaatgtcaccagtgtcaagggtgagagacactgctttacacagaccacactgctcaactgtgcccaacagaaggaaggagtcctcaataccatcaagcacccagtctgtggacaaacacccctgattgtctcaaaatgcctccccacatggacgtgctagaaacctgctaagcaggttcagaggctgcatctggcaggtccgtctcttgagtctctttaatctccagcagttcctcttccccacacctgcttccccatcattcgttgatgatttggccggatgcctccccaaggtgccattgaaccaccctctgccccacatcctagagctgagtaaggagaccttgaaccttcaggagatgacagctctgtatctgctggcaagagcctcgtgggcggggctgcgtctgtgtcctgttgtattacagcaaaaggacggcttgtacagctgcctcctttctatgatgttaaaattataaagttctctccagaatctttcagcagatagttttagcctcactgatgagcgctgctatatccataatatttcattacaccagtggttctcagtcagggatgattttccctgcaggggatatttagcaatgtctgaagacatttttggttgtcacaatcaggtgagggggtgctactggcagctagtggatagacgaaaaagatactgctaaatagcctataatgtccaggacagcccaccccccactacaaagaatgatgctacccacaatgtcagtaaggccaggattgagaacacctgcccctgctcacgccggacacccccggccagcgctcacctgttgatctgggtgacatattgcttcatctccttcagggccacatccagcttggtgaagagctgcaggtaggcatcctggatctcacggtcctcctgcttgagtaggaagctgaggccccggtcttcctgaccaagggtcccactggctggcccgaagctgccatcatggagaccctggccttggggatcaccctctgcagcaggcaagcacttccaggagggagcagccatggtggtgatgcagtgctgggtgtacgacatggggttcaggtggcctgcagtggaggaagagagagctcactggaaaacagcccccagcatccactgggcctttgggcggaacaatacaaacccatttcaaggatcccaatgaaggagaaaaatgtcccttctaaatactcttaattcattcagttacttcaagaagactgttccagtctggtgctaacatgcttttaactactgtgatcttttcctgcctgcaatgcagacatgatggctggtaccccagcagatatcatccacaaggcataaagccacatctagagatgctgtcccataaagagagaaggtcatccctgatgaccatggagccgccattccagccctggacggctgaccttcagacaagttttggtttaagtatctggagtgcaacatctgaacacagtttctaatagacacacacaggtaccttgctccgggtcaaggccgatgagggagggtttgcgtccaaagcggatgctgaaggacctgcccactgagggggtggtcttggggtaggacacttccatgaggttgatgtggcaattggtggggcagaagtccaggccacacagcgggtggggctccaggggggcttgtttgaagggtgggctgaccctgctcttcagttgggctgcaaactgagaaagtggaggccgtaaggtcgtgaatcacagggcagggtctggaaatattggcccatacccagtacccactttatcctggcctaggccagatgccccacagttggacaaaatgccagtagctccaaatgagaaggggaacccctggactgtgtttcacggctcaggactgcagggaaggcctggaggaacccaaggcctcggggtgcccaccccatgcatggctccattttggctgcccctgaaccatccttgaggcattgtctctgccccaccctcagttcatgaggttcagggtcaacgtgcctctccatccctatggcgattggaaccaggtgaggcaagtgacctaagccaagccaaccagaactcccttggagttaattttctcctgggcttgctgaggctagagctatcaagggccaacgtgtccccaccacatgagaagggtttgcctgagagtgaacccagcgctaaggaaaacgaagccaggagatgcggagaggccgcactgctatgatgtgataagttcacctccgtccttttcagtaatacacaccatacattctcctgtttgtttcagctgagttgggttgggctttgtaatttacaacccaaatatcccaggctgagatgctatgtctgggacctgtggcagagaccccggagggagcacgcaggcacctcctggtagcaggcaatcctctggccaatgctctccagcttggtgtcacagatgttgcggaactcaaagtggggcatggtcacgatggcgctgctcagggccatgagccgcctgcagttctccacgaagacgctgtcattggcagcaaaggcctcgaggatctgcagaaatgtcaacagctactgagcattccctgtgtgccgggaagattttaagcggttcacccacagtgactcctgtactactcgtaataccccccgggaagtcaggtgtgttgctggcccatattgcacgggagtaaactgaggctaaagggacaagccactctgcacagtcccacgctacctagtggtgggacaaggaccagaattcaggactccaggctaagcctgaggaaatgggattcgggtgtcccacccaactccttctcccaacctttgataagagaaactggcttcaatcccccagggtagggcagggccaggcagtgcccaaggagaccttggcggtgaggccgaagcagccgcggggctccacgatcttctccagcacatggcacctgacgcctgccgtgctcacatactcatacaccacgccgtgttccaggtgcacgttgtccacagtcagggtgaccatggggctgtcctcacacaggctcagccggggacccagggacagcagtgggaaggctggaagccaaaagaggtgacatctgagcagagatcagagggagggaggaaggcgaggcgaggaggattctggaggaagccttccaggcagtgggaacagcaagtgcaaaggccccagggcaggagtacattccgccagagtagagaggcgagtggggaagtgatggaaggtgttggagagccagtctggacaaggtcacacaagccatccaaggcctggccctgaggacagagggagccatcggaaggttctcttctcatctgggggaatagccccttggaggagaggaagtcagaacagggagagccatgagcaggctactgccaccgtcctggtaagaaatgatagtggcttggaccagggagctgaaacgggcaaggaaacagattctccccgagagcccaaggaggaccacagccctgtggacaccatgatttcagcccagtgggactcggacttctgacctccaaaatttaagtagtaactgtgtgttgtttaagctgctgggtttggggcactttgctatagcagccatcagaaactgacataacatcgtgggcatcgcggccgtgcgcagtggtgcacacctgtaatcccagcactctgcgaggccgaggcaagaagattgcttcagcccaggagttaagagaccagcctgggcaacatagggagacctcatctctaaaaaaaaaactctaaaatttaaaaaattagccaggtgtggtggtacacgcttgtgatcctggctactccggaggctgaggtggatcacttgaaccagggaggttggggctgcagtgagctgtggtcacaacactacactccagcctgggtgacagagccagaacctgtctccaaaaaggaaaaaaaaaacaaacctgctggcatggaggtggactggctgggaggaggggaggggaggggacaacaggagaggacccagcccctccggagtctcagtccctctggaagctcctgtcatgccatgccccgtctattacctgaatcagcctggtcttcctcctgggcctgctcgccactggggtcctcagtggaggcctcctgactggctcgtgcttcctgggcatcctcatgggtgtggtagatccactggtacaggccctgccagaagccagagtaaggggacagccatggtgccggcaggtagggaggaggggacagggccgaggtgtgaactgcccctgggttccagagctctggaaactcactgaccaccagtcacactcagccctcaccgtgcacagtctatgctccatacagaagccaggggatgtgaaaatgtgaggcagggacatgggtgcagacacgtctctcctgtgtccccagggtctacaaacatgcctggtgcacagcaggtgcccaacacacacacactgagtgaaccagtgaatcaatcaatgagggaatctcgccctccaccagaaccctggcccccaaccaaatggagtatccactttcccaacccacttgactatgtgcccaacatgcctatgtggtgaggagagagggtctggtcacacccatttcacagctgtgaaaaccgagacccccgggtatcatggctcagcaactctggtttaaggatgcagcgggagcacaaagctcaggcccagctccctcttgttgggtcagcagctccaccctactcacaaccagtggtacatgcaggcttttctctaaagagaggacagccctcagccacccacccccactcagcaggacttctttgacggccccggtttccagtaaacttaccagggcctcttcgcgccgactccggaatgcctggaagtgctccaggacctcaggggcaccatcgttcatcacgttgctgccattgaccttcagaatgcactgaccagcacagagccctgcagccatggcctcagagcctaaggggaacaggagcacatgaggctggatgccaggcaagtacaagcagcccgctgaacactgtcccccaccacccaccactgcaaccccagacacgcgcaaggactccacctccacccctcccaccccagagccgccctctgacactccagtgcaaagaatggattgatgttcccattttgcagaagaaactaaggttcagagaagtagtagctggcccaaggtcacgcagcaaggcaaacgggatccgattcaggcccgtttcactctagaacctcgtctcctttaaagtcctgcagccgccttgtgctactgggccgcatttggcagaaagcgtgatgggctcagagaggcaaagccatgctctctaggccgaatggccagaagccaggattccaaccaggcctatgagactccaagggcaaggtttttcagctattccacaatccccaaaccgtaggtcttgaacccagggttttttttgtagttcatgtgaaaggtctggaaatgcaaacaaatgtcaagctttgcccagacatggggcaataccaggcctgaatggtgtggtggtgccaagtacagcccctggggacttgcatggcttcaaaccctggctctgccatagaccgaccctggaaccttcggcaagtcccttcactctctggaggctggcttcctcatctgtgaaatgggaacgctcataatccctacgctgagggtcgcggggagatccgacgagctaacacgtgtgcagcatttagcatcgtgcctggcactcggtaagtgctcaaggaatagcagctggtttattctttttaccgtctttgcctatgaacacctattactacccattatcagtatctctgcagatgttctgaggcaggatttctcaccaaggcactgctgacattttgggccagataattctgtgtggttctctggggctgtcctgtgcactgcagcacgtttagcaggatccctggtctacccactaaccgccagaaacaccccctccccagttacgacaaacaaaaatgtctccgggcagggccgatgtcctctggagaggaggctaagttgtcccaaggtgagaatcactgctttaggacaaaatgaaaacctactttaaaatattatcaaattctcagtaaccttctgtcatggtatgcgttttcttaatgaacacctagtaaacacacaactatgaccacacaagtgaaaaatttatgtttaaactttaaagggaggggcacttagatgcaaaaaaagtttgggggcccagtatcatagacctacttggttccatctccaagacatagtgacgcctttaatagcacacaaggaataggcaatgcagaaagcagaggtcttgaactggtggcctttcggctggatccggccatagaagtattgcggcagagcccccaaatttgcattggtggcttctcttagaaaatcaagtctggtgagagtggacccacattcctgtctggcaataaggagctccagctgaggagccactgctccttccagagtgaacatgtattttttcaccttgccatagtcctcaccactacccactgtcttccactgggatggctacccacttgtagcctgcctgaccccaacaggcatttgtgtttgcaagtcttggcatcaggcaaagaaaataagtgctgatggtacattgtctggcagaagcctagagttcagaaggctctgaactcctgccacacagacagatccaccatcttctgcacctttcccctctctcccaaggctcccactcacctctccccacagcatagacgtacggtggggcagctccacgaatctggaagcacagtgtgtccggctggtcggggattttgatgatcctgcaccaggtagaagaggcagggaaaaaggccatgaggaaaaccagcatcactctcaataaccccggtgccaacccagagactttctgccttggaaacactgggaaaattcagcccaaaatagtagtagcaccaccaggctttccagctcccaaatacagagagaaatgtcaatcaggcagagcccatgccaccaggatctttgattaagcacaacccactggcctgcccttggagcttctgtcctcgaacagaaattccagaccatcctcccacacctccatcattctcctgtcctaagacccttggaggtgagaccagcactccaaccagtcaatagtttaacaatcgcaggtgggagggtgagaagtgatctgctggtacatctcggtgctgaccctagaaaaacacccacacaagtcccctaggaaggcaggtctgggccattctgtgggtcgatccccaaagcagagaggcagcacctgccagggagggcaatgggtgtcactgctcctggagcatcagtaccctgcccacatccccgtctaaggcaggtctccaaccctatgctgcacaattgtccctcccattcccccctgcagataaagccgagctgggagcctgctctcaaaccaggtgtttccacagctttcagcagacacattccaccttggtgctttctgccacttccacataccaacccatcgatcaaccacattttccctaagtcagctcgcctttttactgaaataatcatatttaaaactttccacccctcctgtcaagagaagatctgtgttaaataaaagggaaaagtgaaaaaccagatgcataatttttcaaagacaaaatgctttgctccccggtacctacccctagcacgggtctgctcctcccacccctgctctcgcactctgctgagccaccacctcctcagctcccccgagagccacctttgcccctgacaatctgagctccacttgcagccacaggacttcgatcagaagcttccagtggctccccatgggtccttgccaggggcctccagggctggaccccgttaccctacagacctcactacccagccctccctctcactcactgctccagccccatcagcttccttctgctcttccaatgcgccagacacggtcccacttcagggcctctgccctagctgcttcccctgcctggagccctcttcctccagaaatccccttgactcccccctcatctgcttcgggtcttcaccccgactcgcagtgacgtctccctgacagccatccctctgcacactctggcccctttcccgggtttatagaaacttatctgtgccacgctcaccagcacaggctcagtgtcttacttctgtatctgcacattgtctgtctcctgcctcctcccccaactagatctgagatctatgaatggcaggaaccgcatgcatccccacgtggctggattcccagggcccaaactgccaccaagcacagagtggcactctgtaaacatctgccgaattaatgaaggtccagcttgtgttgtgtgactccaacaatgggtcccagccacgggggaccaggacagttcatgccaccccagccctcagccaccactcagcctgagagggagggctgccggacaccccgccctgggacactcactctttggccttcgtggccaccaggaggcgcagagggcggcgggagcagaaggactggttgaggatggactccacctctgaaaacggccgcaggaacaccaggtcctcattgatggagtagatcttcctccccacctgcaggccagccacctgggtagggacggcagaggacagacgtgcacaccagttactaagctccttccctcctcaccaaggaagctcaaatgtgttcagcagaagggtgctggcccaagggatccagcaggactgggtgactgcgtgctgtctgtggtaagcagttgaggggcacaagggacctggttctgcctcatgagccacaaagggaagctcatgggagggcagctgggaaaggtattcctcctgaggggaaactctgctggggcctgaccctgttgtgtggggacacgagggtcacaccggggtggccatcttatgtctgttagggcctggcgaagaaagatgaagacctgctgacccgaaccaagattcacaactgcctccttccaaccgctcacatcactggcaaggtcaacctagccgctccggccatgggtatgtcgctccttgcagcccaaagcattcctaattgccacaggggcaagctgggctccagccagcacggcaggtgcatctcccccacccacctgcacacgccccaggcaaagccggaaggccccagggctgaatcctcggccagccacaccctcactctcctaacctatcctcctgtaggctttgcatcagacagcaatgagcttatcttattcaagccactgtgactggttgcagaaaactgagacacctgcttttttcctgtacctccccacaatgtccagcagagggcagtggtggaacacaccaggagcacagccccgggactctgcactcactcccagctactgtagccactgcagacagtgggtcctggactcagtttctccacgtgagcaatgagagaagaggagtcagcgatcattccagaatctcctgggctgggctgcctcaaggagggtgaagagagacaccccgctctgccacctgcacacggtccctgccagctcccccgagggcctcacctcagccagcgagcccctctggacggacttcaccaccacagccttgttcttctcctcgatgtcaaagccatagtcctcctcctggggcaggatctgggggcccagggcagaaggaacccggtcagggagcgaggtgggcctacggccagccccaccgtggcccccacaggaccatgacctcgtcccaggtctagtagggaagtggccagatccaggtgggcgagacagagcaaaacgcaaacagcacctggcagagccagtgctcactctgtgcctgccactggcttaacgaatcacacggatccaaaggtgtccagccaccaagaatgtggagtcagggagtttagggaggagcggtcccaccccagggcaggatggcaggcatgctagaaacaggtctgggggttccccagtgcgggggatacagggaaaggcactcattcagtcaacagacattgattgagatgctgcccatcacacgggccaggcagttctcatgggtgctggagacaccatctagaacaagacaaacaagcccagccctgcttagtgcgggaggccaactataaacaaataaacaaaagaaatacaggatgtgatgcagggagtgtacgtagttggaattaaagcacttaatgggatagggcacggcaagggggcagagaaggtgctatcggagctgaggcctgaacgaaatgaaaaacaaaacttcataaagagtggaggaacatgctccaggcagcagacacagcacgtacaaaggtcctgagggaggccccaaggcactggaggataagaaaagagatcaggaggtcaggcgcaatggctcacgcttgtaatcccagcactttgggaggccgagacgggttgatcgcttgatcccaggagttcaagaccagcctgggcaacatagcaaaaccctgtctttataaaaaatacaaaaattagctgggtgtggtggcgcaggtctgttgtcctagccactggggaggcagaggagaggagagaggagagaggggaggggagaaaggggaagggaggggagagaggggaatggaggggaggggagggaagaaagaaaggggaggagagaaagaaaaggaaggaaggaaggaaggaaggaaggacgggcacgagagagagagagaaagaagaaaagaaaacaagaaaagagaaaagaaagaagagagaggaaggaaggaggaagggagggaaagaggaaagagagaaggggaggggaggggagtgagaggtttaattttatcctaagtgtgacgggaagcattgggggactttacagtgaggggcatgaaatcagagggaacagcagtccctgcagtactatgggagagaagttaatggagccgtcttcatatgagtcaggcttcagctccaaccctggcagtgaccagaaacctaacctctgagcctctgtcttgactgcctgctgcaggccacgcgttaagatgggggctgctgtggggtatgcaggatgagttgcttcaggaggccaacctctctatacagtgtacggggaggggacaggagaggcaagggaacagaaagggagacctgcaagcccaatctcttttgttaggagggtagtctcagccagtgatgcagcctggcttcttggcagagttgccccctaccacctagaatccacctattctggtactccaagctgagcccccttccctgtgcataaccagaaggtcgcccagctcccatgcctgcagggggctctggcaaggaagggacagctgctcagctgtgctcctaccagcaggcgcttggccagaatgttctccaccagcttgaagtcgttgcgaagctgtttgttcttgctgctggtcccctccatctcctcgtcagcatgaaagcggaagtactgggactcatccctgaactcgctcttctccagcactgcagatccacagatgtgcactcagtggtcagattcacagggaaagtttcagccatgtttgccaactggcaggcacaggctggaactaggccatggacacgtttggtttggcaaacactattctattaaaatggaatcatatgccaacactaacatattaggatatttcacaaagcgatctggctttctgacttctcttgaaaagtctgaacttgcctcacctgctataaaaagacattaatattttacaaagccatagtaacacacagtgtggaaatgcagtagaaacagatcaataaccagcagaagggaatagaagtcacataagaggactaagtgtttgcaggaacttagtctatgatgatgatttatgatcatagagtattctgcagatggtgcatggaaaactgacttgcccaggggggaaaaaaattgaatccctacctcacaccatatgcaacaataagctaatggattaaagacctacgtatgaacagtaaaaccaaagctaacaaaactaaatataggatgacatctttgtcctagagaagaaaaggagtctgtgtataagaccctcttgtactagactaaaattaaggacctccattcgataacaactccataggtagatggcagatgtgaaggtaactatagtgtccaaaaccaacaggaataaatatctagaatataaaaacctctaacaaatcaactagaaaaagctcagaagctcacagataaatgggcaaaggatatgaacagtcaattaacataagcaaactccaatgagcagtaatttgtgaaaaggcgctcagacctctcagaaggaaatgatgctgagacactttagaccaaaagttggcaaactcagtccccgcaggccaaatctgctccactacctgaccttatgaataaagttttattggcacacagctacggccatttgtatttgtacttgtattatctgtggctgcttttgagccacaaggacaaagttggatactgtgacaagctgtacggcccacaaagcctaaattgttactaagtggccctttacataaaaaaatatactgacgccggccagaggcggtggctccgcctgtaatcccagcactttgagaggtcgaggcaggcagattacccaaggtggggagtcccagaccagcctgacacaacatggagaaaccctgtctccactaaaaatacaaaattagctgggcatggtggcgcatgcctgtaatcccagctactcgcaaggctgaggcaggagaactgcttgaacccgggaggtggaggttgcagtgagctgagatcacgccattgcactccagcatgggcaacaagagcaaaactccatctcaaaaaaaaaaaaaaaaaaaaaaaaaatatatatatatatatatatatatacacacacatatatataatataatatatagtatgtatataacatatataatatatataatgtgtgtgtgtgtgtgtatatatatatatacacacacacacacacactgacccctttctaggacaagccaggaaaatgaataaaaataaccagtatcaaccaattggtgatctgatccctgtaacttacaacttaactgggcacctcccagtgccaggcacactggggaggcatgctaagttcatctgctccttggataaggatttgctgtgcccctttcatagacggggagactaagactcaggcccctaggtcacacagccagcagccagcaggcagcagaagggccctcatcgagcctccttcctctcctcctcctctccccacactgtccaggcaggcctgttagatgaggcagggctgagtataaacagtggacaaaggtggaaatcaaggctcggagaggtaaaggcagctgtcggacgccagtgggtgcctgaaacaagggaaaccagctgccttagccacaagacatccccctcgtccctgaagacagaggctttttctggatgtggtgactcagtggaaagcagccgggggcatttctttctttctccttagttttataggacatttcacctggaactctacctgtttgtgagcccctttctcaggccacccctgttacctttttgagaaaacagacacacaaattgccactttccccagagctggggagccaggcaccagggggccgctggcttcgactccactataaacattaagttagaagattccaggagtgggaggaagaattgcaatgttgcatattggccaaaatatttgtggaaaacagcgtggaatccctcaagtccacgagctcagccaagcgagctaccaacctcaatacctttccctcgaggctgctggtccggctttataggataatctcagatctgggttcaaatccctgctcagccccttcctgacttcatgccctttagcctctctgagcctcagtttccttgtctacaagaataacaacaggaccaacatgctggggtggctgtggggattaaatggcaagcctcagtttccccatatgtgcctaaagcaagagggccggacccctggtcagccctaaggtgggaataccttagtgtctgcaggctcagtttggccccagttcgaggcgcctcaaaaggtgccacagaggcccctcccaatcgcccatcctgcacctcaccctgtattttgctgcagccacaatcctggaattggccctttcctattttagcctatttttgagttcgtggcagggaacagaggagcagggtcacgccctgcaatttctctccctgagagcccttgaggacatcaggattgcctgggagtcaccacccagcagaatgtccacagccagcagccttcccggaatagcagctggggaggacccctaattaccctcacccacaaatgagaggttgtgcccagctgactggcgggaggctcggggctgtcagagggccccgaggcaaacagagcagcttctgggaatgaaggactttggtgagatgaggtagacacatgaaaatgccctcagctgtccagactggcccttacctgcccacctcagctggggaaactggaagctaaagagtgagtcctattcccacagaactctgggcatgctgagcgcacaggaggggaatgcaaggcctccaatggaaaactggagaaactgaggcccagagaggcatatgggcctattgggagtcagctgagtcagggacctgctggccacaaggcaggggatagatccaaaggcctctcaggtctccagcacgtggctcactctgccaagggaaccgcaaatccagcaggccgaccagggctcaacaaactatggcccggctgggtgtggtggcgcatgcctgtaatcctagctactcaggaggctgaggcaggagaatcacttgaacctgggaggcggaggttgtggtgagccgagatcacaccattgcactccagcctgggtgacaagagtgagacttcgtctcaaaaaacaaactatggctcaccacctgcttttctaaataaagttttattggcacacaaccatgcccatttgtttacatactctctatagctgcttttgtgctacaaaggaagagttaagagttaagcagctgtgacggagtttgcagatctctgagttagaactaaaaaagccaatatcagaaaggagaaacagccaaaaggccttcttgtggctcagggttttctgaatctgaccacttctaaccccttgcaaccaccaggtcccagccatatcctccttcccctggactatcatgaccacctcctcgctggcatccctgtttccttcccctgcacacaccacatgcacatgtgtgcacacacatacaagtgtgagtgcgcgcacacacacacacacacacgggactgttatctgtcctggtcatcacactctgctcccagaacctggcacggtgcctggaacaccaaagacaccacacgtgatgtcagaatgaacaaagacagaaaggagtgatgggatctgcctaacagggagagaacaggcccttaaaaaaaagagaatctggtcgggcgcggtggctcacgcctgtaatcccagcactttgggaagccaaggcgggcagatcacgaggtcaggagatcaagaccatcctggctaacacggtgaaatgccatctctactaaaaaatacaaaaaattagccgggtgtggtggcgggtgcctgcggtcccagctactcgggaggctgaggcaggagaatggcgtgaacccaggaggtggagcttgcagtgagccgagatcctgccactgcactccagcctgggcgacagagcaagactccgtctgaaaaaaaaaaaaaagagagagaatccgagctaggagcagagtgatgacggggaggagctattttagctggggttgtggggaggccctcactggggaggggtcaactgagcagaaacactgagttacctgcagggatgaggcaggcagggcaccctggcaagggaaactgcaagtgcaaaggctctgaggaatgttctagaaacaggaaaatggcaccttggcgggggttaaaggtttacctgtcctgttgaaaggacaggaaactcagggatcccccaggaccttcaaggggagaggctacatagcacagtagttgagtgtgcagcctctaaacccgcacgatctgggttctaatcccagctccagacggcctgaattctaatcccgactccagacggcctgaattctaatcccggctccagacggcctgaattctaatcccggctccagacggcctgaattctaatcccggctccagacggcctgaattctaatcccggctccagacggcctgaattctaatcccggcccagacggcctgaattctaatcccgactccagacggcctgaattctaatcctgactccagacggcctgaattctaatcccgccccagacggcctgaattctaatcccgactccagacggcctgaattctaatcccgactccagacggcctgaattctaatcccgactccagacggcctgaattctaatcccggctccagacggcctgaattctaatcccaccccagacggcctgaattctaatcccggccccagacggcctgaattataatcctaactccagacggcctgagttctaatcctgccccagacggcctgaattataatcctggctccagatggcctgaattctaatcccgccccagacggcctgaattctaatcccggctccagacggcctgaattctaatcctggttccagacggcctgaattctaatcccgactccagacggcctgagttctaatcctggctccagatggcctgaattctaatcccgccccagatggcctgaattctaatcctgactccagacggcctgagttctaatcctggctccagatggcctgaattctaatcccgactccagacggcctgagttctaatcctggctccagatggcctgcgttctaatcccgatttctacttgccatgtaaccttgagaaagtttcttaactatctgagcttctataccctcatctataaaatggggctgatgttaatactcacatcaaagggctgctgtattaaactaataaatatatgtgaagtgtctagaaagagcccaggcacactgaacactaacttttgttgtaatttaaaccggtgtccatggagccacttcgtcctccttcttgccatcttcctgcctcaggaacatctcagaactcaccccccaatacctgcctctctcccaatggaaagaaaagtcacttatctgagggaggaggccggggaaagaggcagacatcccaggaagggcttcctgcctctcacattcacaacccacctgcccactgtcccacagggcacagctcctccttcctcacggaggccttcgggccaggcctgcctcatctggccttgctgcctaccctggaaggccacatcccccccaggaagaagggcacaggaaacccatgggttggacttcaaatctagcccatgtccttccagccattttggtccccagtggacaccagaagccatttctcgatcggttcagaacgggaaggggagggaggtgggattcgtgagcctccccaaacccccgggggtctagagagccacagacctggcttcagtcctcccatactcccccaaaccatcagctccagggagcaaggtcccgggggctgggctgcaggtgggggtggttaccgtggtgcatgaagccattgttgcacagacccacgccgagcgccactgcctcctcccgagtctggcagtctccctggaatggaacaagaaggggagggtgttaggtggcagcatccgagaggccatgcatggccaacgagaagcccacaaccacccaagaaggtaggctccacgagggccaggggttgtctgttttgtttactgcagtaaccccaaaacgggtttgtgattattattttttattattattattatttttttgagacagagtctcactctatcgcccaggctggagtgcagtggcacgatctcggcttactgcaagctccacctcctgggttcaagccattctcctgcctcagcctcccgagtagctgggactacaggcacctgccaccacgcccggctaattttttgtatttttagtagagacggggtttcactgtgttagccaggatggtctcaatctcctgacctcgtgatccgtccgtcttggcctcccaaagtgctggaattacaggcatgagccaccacgcctggccccatttgtgattattattaataaactccaaacaagactattttattgtactgtgatcaataccgcaaagaaaaaatggagattttaagcggcagacaatgttggttgcctagcaacacctttcccattcctccctggtcaagaagccctcatccatctccagcctcccttgcagctacaggtggccaatgagctataagcagaaatcactggtgggatgctctggcaaaaaccccttgtccctggccctttctttctcttcctcccgcctggaacaaagatgtggtggctggaactcttgcagtcactttagactacaaggtgccctcatggctggaaacacactaaggaaggcagagcagaaagacacagagagtgtggtccccaaagatatcaggagacactccagcagctctgaaccacccacctctggacttctctcatgctacagaaacacaaaccctaatttggctcagcttccataattgtgtctctaatactagaaatcaagttcaattgctaactgaccaagcaccagctaataagacgactggggaagcctaccaggggcttctgaaaaacatcttcccccccaggtaaaagggaaaagcagcaccactcctccctgcctgggataaagtcatgtgaggaagtgatgctcaggatggtggggtgaagaatggaagattcttctgtctgctactgagcccacaaaccagccctggaaccacctagctccatgcttcttgataggtggcatctctgtaagccactgttcagttgggcttgttatcctggcaaatgaaaatattccaaactgatacaatttgaaccaaggcaatctgactcatctcaggacttcccgaaggaagtgacatccaacccgaaacgtgaagaatgaacaggcacggcccgtgtgctggaccctgcgggtttggcctttggggccaactctcccaggtgggatgtcatcttggtggggcagttgatcaaggtttgcagccctcctaggccaggctgaggccaaagggatgctccctgccccaagaacatgacacttgagtggaggaccccaaggacaaggaaaagcagcgctgattgtccctcacagcggtgtgctggacagagcctccacctgctagcttctcagcatttcccggtgccagttcttcctaaggcctcctaggcctgccctggctttctgagtgccccacctcccttcagtgagtcatcctttgttatccccccttcaattagccagggcctgtttctgttgcttgcaacccaaatacactcaatacgtcccggccaagtgtgtgacacgtgtgtgtgtgtgtgcgtgcatgcgcatgtgcaggtgggagggactgtcaagcagaggaaacagcaggggcaaaggtctggagatgggcagaagcttggagcgcagaggaaccagaaggcagcacggccgaccaggggaggacaagctgagtcaggcccgtgggggccaggagccggcactgctgtgtccccgctcaatcctaagtgctgggaacggggctgacctagagtccctgctcaatagctgtctgctgatttaataaaggagtggtcagcaggggccagattgtgtaggagcttgcagccaggtcaatgagcttgaactccaaagagaaagccacaggcaccacctagtctcactgaaacgcctcccagaatgaggagccctgagaggccccgcctgtaccctcccgtccacagccagaggggattttccaaccagaggagacaggggtgctattcagaggcagcaggactcagccctgggcagaaggcctggggcagagcctctggccttggcatttcaccacactgcctgccctggctgactccataaagacacatttctcccacaggaccccaagccagtagctggagggcctgcgggttgggaaccctgccaggggtggtggctatgagaggccatatccagagcagcctcccccacgccgtgaggggccggcagtggggaggccagcagggcccaatggcggcaggccctagctctgcagatgggaggcccggcaggcagctggagccacctggccttctgaggcgctcacagtcccagcctccccacagggtcttggagctcctaaagctaggccagcagggactctcaggtcaacagtgatacagaaggcccagatgtgccacctgaacaggaagccctgccacctccctgcagccctctgggaaggatgcaatttctcctctcccagaggaagccgccacacacgagacccctgcaacctcccccgccatgcttccctgccttgactcccccacccgcctgcccacccccaggtgccctctgcacacctcaaggcctttgcactcgtcctttcctgcacacctggaatgccctgccccggctttgcaggtctcagggccgtaccacctcctcagagagtcccatccttaactacctgaaagtagccccccaaacattcctccacccatcctctcaataaacgctcaccagtcacacacactcagtaccctgcaaggcatctgtgccaccctgtcccagtctgaaattaactcacccatgtatacattttgcttaaggtctgttgcccaccgggtataagctccatgcgggcagggacactgcctgccatgttcacctcatcatcccacatcaaaattcaaagtctcctacttggtggggcacaaaaagtggaaggaagggaagaaaagggatgtgatgggagaggggaggagggacagaaagaagggagaagagaggacctagtttgaaaactgattctgaactcacctccctgtctcggtctctgtctatagtggtggggagagtgtctccatcccaccaagttctcgtgaggattgaatgagacactctgtgcaagacccttggcccaaagcctggcacacaggcagcatttgataaatgttagctgttcctgattagttattttttcactggagagaaccactgaggaatgaagatggagaaggcaaagtggggtggagagacggagtaatgggggaaagaggtgtcagttacacaggaccccagacagcctctttacccatgaattccgagaccccataaagatgcccaaggatgcctctcaccgacccaccatgtacaaggagctgcaggatttcactcagactgtatggttgacctggagacaatcactcttattaaccccactcgacagaggaggaaacagaggcatagacagacttggcagttgctcaagcttacacagtaacaatggagactgctcagagctggacaccccccgccaccatgccatggagaggggaagtgaggctgagaggggaggttagttgcctagggttgcagccaagtttcctgttcccatttctcctgcgtctcttctcccagtagtacctcaagctgccagcctgacccccgcctctcctaccccaacccctctctgcccctgcccctgctgagaaccctgctaccatcagtacctgccatctgcctggtagtgggagcccacgtggcgggcattccaggtgcatttctgcagagccagcatgggagcatgcagatctgtgcccgccccacacctggctccttggcctggcctctgctctctcctgctcagcctgctgaccccctgccctgcatgtgacggtcgcagcctggggcatcctggagcccaagtgacacagacccagaaatcacccagtggagaggtgaagagagcaaactccagagctggcttcccccgattcaaagccccgctctgccctggccacgtccttgggcaatcccttagcctctctgagtatcctttcctcatccatatttttatttcattctcagatttgcccttgattctcctaggcctctgacacccctgagaggtggtctctgctcagactcaatcagcgatcattaataccaagcgttatgattgttattgactatgaaggcatcaggacaacccctgccacacacaaacacacagaggatcctggtggctgtgtgccctgcggcaagttacataacccaagcctcagtttcttcatcagtaaaatgggaacaactgcatttgtctcaagttgttctgaggattaaataagataatgcaccaagccgttccggagctgacagagagtgcaagttgtctctccaacggccaatgcccacctcatcctcagagtttaaagaactctgattgtctgaatagtgcctagcaagccacctcccgaagtcagaagaaatgaatcccgaggaattctaagccactatcagcaatctcggttctcttccccaggggctggtttaggggtgtatgtcagacccatccagccaatgagacctaaggaaaagaccatgcaggggaagggaggattgtaggaagtttcctcccctaatacacagaaagaaaaaatgttctccaacaggacagcctttggccatagttctgtgcagatgtgatgtctggagccatggctgccacactgtgactatgaggcaactcataagaagataccaggatagcagaacagaaaggcaggagatgcctgggtacagacggcattgttgagctctaggaccacaaactccagacaataaattatgtgagagaagaatatcgtattaataagtcaggtttcctgttatgtgcagccaaacgcatgtgtaactgatccagcagggatttaatcaacattttattttaaggggtaaaataacctagagttagaaatgaagacgtgtccaaaaaataccctcccgccctacacaattatgtgttcttcccactttcctgctaagatgcaaggtgggggtgactcctgaaatcaagacgggctgtaaccacactccgaggtcacatccttgtcacagatctctcccgcacagaaagacccacgcgggcacaccctcctcccctttccctgacccaagccgaaggccagttgcctttccaaccatctcctggaagtcatcctcctgcgtcagctccagttacccaccctgtgtccccacaccaggccaagccacagataggctgctgaagtggatggacacattgcatggtcggctacagcctttgctcgacatcctccccgtctccacttgcaacaagatgcgggtgcctggggttggggggctcaggacagagtgacagtgacgcaagctactccaaggggcctctggccgagcccacaactcctcggccagcactggccacgagaaagccccccgcatgcccagcaccagccaccaacactggaagtggcttttactggttcctcctcctccagtctctaaatgctggagtgttccagggtgaaggcctgagcctcccgcacacctgcctctttcatagcatcccagctcagtcaatggcagctcaagccaaaggctttggagtcattctctgctcctttctgtctctcacctgcaacgccctactcacccatgagcaacctattaggtccaccttcaaaacatccagaatctgaccatttctcctgccacccccaccaccctgttctcagccagcatcctcccctgctggaattctagcgttgcctcctactgccctccctgctgccagcatcatccctaaagtctccacacagagccaggggacctgtctgaactgaagccacacacactgctcctgtactccgagccgggcaggggtctgggcccttccaggagtggacacagcctggcatggtgcgcccacgcggcttcctcgccactcctctcccctctcactccattcagccaccctggccccctctctgctccccagacatacctggctcgctctgcctaagagcctctgagctgctgctccccagatgtggcctgggctcactccccacttccctcagccctctgctcaaatgtccctcctcagtatggccgtccctgaccccctgtgtaaactgcaccaccccgcccatgtgagggggagatcccctgcccccgctcccacaccgttccctccaccacattgcacctagcaccagcgggcatgtgatgtattcctcttattcttatttattaagtgtctctcctatcctcaccagaacgtaatatctgggagaacaggagcttttgtctgtcttgttccctgctgtgtctctagaaccaaaaacagcccctgatacacggcaggtgctcaaaaataattaaaaaaaaaaaagttagctaatgagctcgcttgtctaacttccctacactctcttctaacctgtgtcaaatgttacccaaaagctgacaaggagcggactctgcagtgggggctgcctgaggtctgggtgtgtgtgtaaagcccaccctctcccctgcccatccgctggaaagccccatggcatcttgcgtgcccaaggagaaagtcattttccccatacattcttgcccatcttcccatctccacaaatggtatttccatcggcctaatgcacccaaatctcagggctcatccttgattcccagccattcccacagcagtgcaacccgtctcttctatctccaaatacctctcagacccgacgtcctgttgtctccgtgagccaacccaccctgagttaggcatgggattcaccctgggagcaatgcctcccctatgctttgacaccaacaggcagctctgagcactgaaggagcttgggaaatatgaggccccagaaacgtccacagcagtaagaagtgggcagctctgagagccttgaaacccaggctcctctgggctctgactgaagcacctaaaccacaaaagaaactcccacatggcacccctgtcacctatttgtagcaaattcagaaggcgggactctgtgcagattgctaacccccccacctctgtttgtttcctggtcttactggtctcgtggtccccaaacccttgcacaatttctttagtcttctatattgcatgtaatcttgggccaccttgaatcttttgtgaaagagatgaggaatcatagtaatagttaacgtttattgagcaattactctatgtcaggcaccattctaagcactttacacaattatctcatcaaaacctcaaaacaatctaaaggagaaggtattggttttagcttcattctacaactgaggcccggacaggctgagcaacttgtccaaggtcactaacctaggaagtagcaaggctgggacttgaacccacgtctgtctggctataaaagcatgagttctgggctgactgcatgtgattctcacgagggctggggagtgtggtacaatggttagcagctctgcccttcacagacatgcaaattggaattcaaatccagatatttcaagacctcccaggacatagggtcccatatcatagcaaacatattaaaatgcacccatatttcacatttgatatctctttgggctagataacttattttcaaggatgtttctcaactttcttttgaagttatttggtgctgaaaaacattcactttaaaaattggctgtgatttatcagcacgtatcaggaatttgtgcaacatgagaaaatccaggcagcaaattgttttcaaatgaagtttttatgaatgtttaacaattaatgaggccaacataaagctgcactctgtagatgtttaaacatttatccatttttatttcacaggtttcttctcatctttgggagccaatgtgttctttttacaaaccatgaatagatattcttgaggactcgctgaaaaattcacagaaccgaggcacagtgggtgagtcccagctttgctactatgaagctgtgcacccttggaccaggcactcagcctctctgggcccacttccccatctgcaagtaggttagaggactcaaaaggataacacacaatgcctgctggggccttatccagagtaagcatccataatcctgagcaataaaggagaagagacaggcaacaggcctgtatgtggcacctgaatggagcaaacaccttcgggatattgcaccaaaactgatgcatagattttctaagcttctggtcaacccctacccactgggaacttttttgaaagtagtaacttggccaactccaaacagaggctgcagtttggtaccagaataaaaccatcttgtcctagtttgcccaagaccatcccagttttaaaactgaaagaaagccctagtgtggaagcaacccctgggtctactgaggaatgaatggataaacaaaatgtggtacagacatactgctacggtttgaatgcttttgtcccttccaaaattcttgttgaaatgtgatccccaatgcaacagtattgagaggtatggccatcaggaggggactgagtcaggagggcattaggcatcccttagaaatgggtgtgacgcagggagtctgcccctcccatccctttccccatgagaggacacagcagcaaggcagcatcttggaaacagacggcagccttcgacagacaccgaacctgccggcaccttggtctggaactcccaacctccggaactgtgagaagtttctgttctttataaattacccagtctcaggtattttgttatagcagcacaaatagactaacacacaatcaatggaatattattcaaccttaaaaaggaaggagattccaacatacgctacaacatggatgaggctttaggatggatgctcagtaaaatgagccaggcacaaaaggacaaatactgcacaattccactgctatgaggtaactagagtagtcaagttcatagagacagaaagtagaatggtgctcatcgggactggaggagggggagtggagagttgaatgggaacagaacttcagtttgggaagattagaaggtctgtggttgggtagtggtgacggttgcacaacattatcaatgaatttaatcctaatgaactatccacttaaaaattatcaagatggccgggcgtggtggctcacacctgtaatcccagtgatttgggaggccgaggcgggcagatcacaaggtcaggagttcgagaccagcctggccaacacagtgaaaccccgactctactaaaattacaaaaatcagctgggtgtggtggcgtgcgcctgtaataccagctacttgggaggctgaggcaggagaattgcttgaacctgggaggcggaggttgcagtgagctaagactgcactactgcactccagtctgggtgccagagcaagactctgtctcaagaaaaaaaaaaaaaagatcaagatggtaaattttatgttctgtgcagtttgccacaattaaaagcaataagaaaaaatctttaaacaaaacagaaagccccacactgacggacaaagcagaacactggtcacacacccctgaggaggccctcacctgagccagcagccagtccaccagcttgctcccgggaagcactgacttgtaggtcttcaggtggtaatcacggtctctgtggagaaggtgagcgcacagtgagcagggcagggcggggaggacagaggtgggggtggtcctgacttccctgcaggacgtgcccacgagtcaaggatctccaggctctctaggcattgggcaggggtccgagtctcagcccagactccacacatcacttgcagtgtgaccgagggcagggctgttccaaaccaggcctccttccacctacagagtgggaggcaggaggcagcagctccagggctctggaaactttctgtctctagcccaggagatctcagctgggggtgattttgccctcagggtatgtctggagacatttttggctgtcaagacctggaggggctagggcaggggtgctgctggcatcccgtgtgtagaggccggggatgctgctgaagatcctacaatgccaggcagcccccaacagagactcatcctggctacgatgccaccggcgccgaggctggggagccatgttgactctcacagagtggcaggggagaccctccattctttcctttcctttttcctttttgttttgtggttgacattgatgtatttaaaccaaaccattgtggaaagcccctgcaaggggctggtgtggtctatcagggccgagcagcacagaggcctgtgagtttcacggttctttcctgaggtaactgccctggcctgtgacagcatctgaatccctgccgagcctggatcccatgggttccgctaaccttgcagccgaactgcaacaacttctcagcctctgaagctgtgacaaaaacgcgcttctgtggccagtccatgccaaggctgataaagtctagttggaggatttctctcaggctttaggactgggggggtctgacaggctccacgtgcagttggtgggggtctgctaccttccccagccgcttccttctttgaggctggccaaggagccccacctgccttctggggcttgcacaagagcagcagcagaggagcccaggagggcggaggcaggatggcagatgaaagtggttcccagggcctgacatcccacggggccagcaaatgctaggaaatggtccttcctctccactcttccgagaggtgataagagctatcaggtcagaggacagaaaaatctgcagctgggataagaatcaggtcaccctctctcccttcatccacaactgtgagctttgtggtaaaaagaataaccaatctctggcgttcattatacaatgccaggagccattcaaagcaccttccgtgaatttaatcctcatggcaacccaagaggtgagagctattcttatgtccacttaacagatgcagaaacagaagcaaaagaagttaatcatctttcaacattcactgacaagcttttactgagtccctaggcctctgctctccaataggtagccattttaatttaaatttcaatcaataaggccaggcacggtggctcacacctgtaatcccagcactctgggaggctgaggcaggcagatcacttgagatcaggagttttgagaccagcctggccaacatggtgaaaccccatctctactaacaatatagaaattacccaggcatggtggtgcatgcctgtaatcccagctactcgggaggctgatgcaggagaatcgcttgaatccaggaggcagaggttgcagtgagccgagatcatgccaatgcactccagcctgggcaacagaccgagactccgtctcaaaaaaagaaaaaaaagaaaaagaaaaaaccaaacatataaaaaaaggccaggtgcagtggttcacgcctgtaattccagcactttgggaggccaaggcaggcagatcacttgaagtcaggagttcgagcccagcctggccaacatggtgaaaccccacttctactaaaaatacaaaaattagccgggcctggtggtaggcacctgtaatgccagccactcaggcaactgaggcatgagaatcacttgaacccggcggaggttgcagtaagccaagattgcgccactgcactccaacttgggggacagaacgaggctctgtctcaaaaaaaaaaaattagctaggcatggtggtgcacgcctgtagtcccagctacctaggaggctcaggtgggaggactgcctgagcctggaggttgagactgcagtgagctgtgattgcaccactgcaatccagcctgggtaacggagcaagaccctgtctcaaaaaaaaaaaagaagaagaaaattaaaatgaacaaagggagctgatatcgttgggttgtgtccccacccaaatctcatcttgaatggcagctctcataattcccacatactgtgggagggacccagtgggaaactactgaatcgtggggcagttcccccatactgttcttgtggtagtgaataagtctcacaagatctgatggtttcataagaggaaactcctttcacttggctgtcattttccttttgcctgccaggtaagacgtgcctttcacatacctccacgattgagaggcctccccagccatgtgggactgtgaatccattaaacctccttttctttataaattacccagtcttggctatgtctttatcaggagcatgaaaacagactaatacagaggacagaaagtaccaggttggtgacactttatgcaggtaggcagggaagacccctgtgatatggaggcgtttgaaggaagtgagggaacgaatatgaaggtatgcagaggaaaggcatcctaagcaaagggaacagcaggcacaaaggccctaaggtggagcccattattatccccatttcacagaggaaacggttgaggcacagagaggttaagtaactctgcccaaggtcacacagctgctaactaggagggaggttcaagctcagtctgtctggctccagaactgacacctgcatcactacactgcagtgcttcccacaatttaattcagttaatcctaatgacaaatctaaaggataggtgccactgcaagccccatttaatggagaaggagactggagctcagagaggttaagttgccagcccaaggccacacagctgagaagaggtagaggtgaaattggagcttggaaagagtaacttacttgatcaccggggtgtagaggctgtgaagacggcagtaaagcctcacaccctgaaagaaaaaaggggaggaattctgggatcaggccacatccttcacgagcctccaaatccaggctgatgggagagatggcttccaggacggggcagggcagggtaatgggggcaggggtgagttgtgggcagtggagaaggcaaacaagccaaggggcacaggcctgctctgaggcgaacccagggtggaggtgaacgaggccagctgagtcagagtcacaggggcggagggcccctaccttggacatgatgtcctccagctcacttcgggccttgtaggtgccatcgtcgtagcggaagcgatacatcacctgctcattcttgaactggtgcttgtcggaaactggagagacaggaggacctgtgacgctgggcacgccccctcagcccctcccagccacgccccccagcattggccttcactgccagccacgccccctctgcccctcccagtcacacccaccagcatcaggcttcactgctggccaggcttttttttcactgaaaccccacgaggtgggtgctatgacttccccattttgcacatgaggataccccatcctcctgctacgtgcaggaccctgctgagactcgcagcttggggtggggcatctacaggggtgagggacccagaaatgcccctgatccagcctgcactgggacccctctggctcagcatgtccttagatctagatcaccaatggatgggtggggacaagcatgctggggcctgagaccacattgctgagatttacggagccatctctatcccacaaagtcatgcttgatgcttcagatccattagcaatgcctataaggccctaaccttcaagataccaatcacctcactcctacactggcccgaaccaccttcgcctcccacctggactatcacagcagcctctttgctgggctccctgctgtcacccttggtcccaacagtctccacagggcagccagagggattctgccagcgtgttcgtccaagcaggtctttcctctacgcagagctcagcaacagcttcatagctcactcagagtaaaagccaaagaccctacaattctctataggatctcatctcacctcctggactctcccatcagccctgtgccctctgacctcgtctcctaccacgccccctcctcactctgaggcagccacactccctccctgctattccctgcacaacccacttagactctgcctgaggactttgcactggctgttccctctgcctggaaccatcatgcccacctgggtccctccctcactggtggctcaggtcctggttccaatgttaccttctcggtgaggccttccccatctcccctattcaaaagtgaacgccaacaccacactctttaccctccttccctagcacctatcatgttttactatcttgctttgtaaagataagcaagtaaagatcttatcgtcccctccaactacaaggtcggctccatgacgacaggcacgtcctcctcccgttcattgtggtgtgaacagtgcctgccacattataggcactcaataaatatttgctgaataactaaaacttaaccaaatggttcttgacatttcttgaagggacagataaaagattctactcccctgcccccaggtttttgaggtatccctgatttgctggtgcctaagaggcagttttacaagggcatccatgttcctgcgggccacactgtgcccagaaaacacggcggctgcacgaaaggataggagctgcctgagctagtggaagcatggcacagttggggtctgacctgttcccaccccttggcccagctgggcccagccctccactcaccatggtggatgatgccattctccaacagggcttggcccaagttgactccttcttccgtcttgctgatttcaccaatttctaggagccaggcaacgaactcactgccaggaacacaatatgtggttgagaggatttccccaattctgggaccacaggaatcagcactaagctggcctggccacatccacccctgggaatgacagctagaacttcccacagggaagccgagtgtagtagtctatagcccttggggttgtactgaggcttcatgcttattaccaatagcagagaggagagtgtgaccagattccaggtctgcctcaggctcactggatggatgcatggatggatggaaggaaggaaggaagggagagagggagggagggagagagggaaggagggaaggaagctgggcaggcaggttggtggatgagtgactacatagatggatggatggatggatggatggacggacggatggatgtccggccagacagacagccagcagcacatgggcaggtaggtaagtgggtaagtggatgaatgaacagacagatgacttaatatggggtggatgaagaagagagtgagtagatgggtggatgggtcagggatggatcacagatggctagatggagtggtggctggacagatgaacagaaggaatggacaaacatgcaggaagaaataatagggggccagaaagatgatggcggggagtcaggcgagctaacagtgatgaaaccatgtcatttccatattcaaaaccctcccacaggcttactactcacaaaaaaaatcccaactcttcccacacggacataaacaaggcccagcatgacccactcccaccctgactgatctcacccccaatacctctcattagttatgcctaagccacacctaccacctttcccttattaaaaaataccagactcctccctgcctcggggctgctgcacttgctgttccttctgcctggaatgcccttcctcagctcttcatgcaactgtgccttctcatccttcaggtctcagcacaaacatcacctcctcagagaagccttccctgactacctcatttaaaatggtccccgacccctatccaatccatcacatctctgtgttgcttccttttttgcacttttcactgtctgaagtggtcttgtttacagatttattttacgtatttattggccatctcccccaaccagaatgtaatgacatgaacagggtgttttctctgtcttattcatggcactatcccagcacctaccagagggcctgatgcagagcagggctcaatgatcatttatggaacaaatgaagtaatgaaccatccgacagaaaggaatgttctgaggtcggcaggaaggtctcggggagacagaagtgctcccaggccagaggaagacaggcagctttcccagctcccacgtgactgcccggtggtgagaggctcagccggggccccaggtcctagttcttgcgggtgcttctcaggctcagcccagagctcaacccactcaaactcagcaggaaaagggagagcctggaatggggctgtttccgccgaggcaatctgtgttcaatgaaagcaggtggcagctggccagagcctgagcaccctgcttatcgaaaccagctgtcccgcctccaattacagggccagaggggggcagggctatttttagcttcctagtgtttggcagagcaaagacctgcctggtgtgtaggtagcggtgcgtgctggagcattcagaatgccctggctggaggcagagtgggctgcagaagaaatgcatctgctttgtgggacaggcgccccaggtggggaagggattgttctgggtcctgtccacccccagttccattctcaaagtcttggaactcagggacagggagaatgctgccagcagctgaaggaggggaacagatgtttgagtgcccactctcggaagcccaccagctgtctaattgggggccgcctctggcactgatcagcaactctctggccagggttaggggacaggaagtatcccacagcagctgctggggcagaagaagacggcccagaggacagcaactctgccctacgtttctgcccaaactgggtcttgccatcttctggtggatcaaggagggttcacagcttgctgggcaaagctgggcgggtccctgtgcctctctgggcctcatcagggcccacctgggaagtggctcactcagtcaccttctggatttagcaggcaaaatttctagtcatatgaaatcctgagctgggatgcagtatgcaaaaacccaataaaattcatctctagtgcaggggtctcaaacttgtaaataggcaaaacaggccaggaggagactgtgcagaaccagccggggcctgccgtgtctaaagctggcagccactcttcagtgtagcccatcatggcccattatgttagaagacgaacgcatctaacagcttctcgggagagtgaggaaatccagcatttcctgtgaaatctccccatcattaaatgttcatatcgagtccaacattttctgaaagcactacgtgggccgaggaaaacatgtctgctaactctatcaggtcagtggggcactgctagccacctctggggtacaggggagagtgttctgggcaaggggatcagcgcacacagaagccctgagaggtaaggtcaggaaaccagcgatctgccagtggggaggggcgctggcatgcaaagggcagctaggtccaagctcccagaaagacacagctcaggacagtgtgaggagagctggagatacaaggagaaggcaatctagcttgatgggcagtctgagagtcagggatggcatggtgagctgagagttaggatgtgtcagctttcatccctccttccttcccgcctcctagaatcattcacccactaaacatctatttagcctacaatgggccacggccagggtgaggcacaaggaatacattctgcagtcttcctaagaaagccgcctgagctcaggcccaaggtaccacttatgacccaacacaagaatcccttgttcttgcctgattcctccatgggccgtgggctccaagagggtagggactggggggtacccagtggaatacccatccctgtgactccacggctcagggatgcctcctggagatgacaatgttggacaaatccttaccgaccctctcgtgcacactaacaccctgcacctgtgcgtacaggtggccaagacaccaaggccccttccaccttggagctttccctctggcagacgtccataactgaacagcatctaatctctgccaagggtgaaacccaaggccttcgtccaggaagcttttcctgacggcccctgccagacacgccgcgtcatacctggtaaccctgagctccgacagctccaccaatgccctcgatctggatcctcatctcactccactaccgagactcctccagtggcttcccacagcaccaagacggaaatgtgagctgcctgccaaggccctgcctgaggtgacccactttaactgctgaggccacatctcctgcccctctgaccactcaggctccagccacaatggcctcctcctgttccaccatcactcaaagctcactgcagcctcagggctttcgcgcctactgcttcctaagccaggaatgctgttccccacaccctctcatggctggctcttgcttgtctttcagatcgtggttaaatgtcacttcccctgagaggtcctgactgcccactcttctgaaccagccccatttcctcttgtcctgacttcacgctaagtatttccttagcgcattcatcaagttgctgaaattcccttctttctatctgtctcctcttctgttgtctgatttcccccactggatgcttacctctatgagggcagggacttcatctgtcctattcccgactggcacatagcagggactcggtaacactgagtgggtgaatgaatgagtgaatctgttttgtctcccctactaatctgacgatgccagagggcacaggccatgctcctcccaggacaccctccacattaatacacacagattttattctttgctttttaaatgtggcatctaagagatttttctctgagtagggcagaaagaggcccctccttcatacactcatcatgcacagccagtacgattcccacgagtctcaccagcactgtgctgcacacgtcacgtgttctctcactgtatcctccgacagtcctcagaggcacattttattatctccctttaactgatcgttcactgaggttcagagaggttaagaaacttccccaatgtcacacagctagaaagtgagggaaccaagacttgagtccaagtctaactcaaagccaacccttgggggtgataaagacaaatcaggccaggtgcagtggctcacgcctgtaatcccagcaccttgggaagccaaggcgagagcatttgcaagacccccatctgtacaaaaaaaaataaaaattagctatagaagcctagcacagtggcacacacctgtagtctcagctactcaggaggcaggaagatcgcttgagcccaggagtttgaggctacagtgagttatgatcacaccactgtactccagcctgggcaacagagcgagaccctgtctctaaaaaccaaaagataaatcagacactttttatattcatgcagttccctaacagtggagacagatgtagagagaggaactgctagggaaaaataaaatgtgctgagtagaaataaaaatgaatagacaggcaaagtacagtgggagacagcaccagtgtcgctttgtgatcttgtacagaacccttcccctctctgtgcctcggtttcctcacttttaaaatgggggtagtggcagtgactgtttcacggtgttgtgtggggattaaaagacatggctgaatgccagcacatgcagcaaagggcttgatcaatatctcggaggctaccaagtccttctaccctggaggaccagggacgcatcttggacaagaagattcagtagcgggaccctggcgggggtagcaggatcacacaccctacggctgtgtgcagagcaaagccgtgcagggagaagagtttatcagaataatctcctgcagaaaggctggccctttcggacctgcagttacaaaacaagctgctatcttggccccatttcaaatgggcagtaaaagaaatctctctaatccttcctgaggaggcagaactcctcgaagttctgatcacagacaggctgcctcatcggtccggactgagcagtttggcaggagatgggaaggttctctggccccagggggcccggaagcaggcccctcctgagagaaaaacctcctttcctgtgggattaggagttggctgaaaaggccagccaggctgccccgccccgcctgccccagccagcaggactccaaggcccaaactctcctctccatggaagctcagagctggagttcctgatctttgaggaaaatagggcaccaaggcccttgagggcaacagggcaatagagtccatggcgccctgcaggtttgaacccttctacttgctgcccctccaccacaagcctcaggccatgagtgccagctgtccccaagtccacactaagcctccgtggcctgcccaacatccatactgcaccctgaatgtctatcagcatttcagcctccaccgggctcctgctccttcccagggacctgctcctgcctccccgcctcttcctccccttggcttccggaggagtgccaccttctcgccagcagctccactcagaggtctctgccccctcctccttccaatgccatcatcgggccccagggcccaggcctgcctcttctatcccttcaggttcccctgcacagttcaggccgtctcatggctttaaagaccatttaacaccatctcccatgtgtaggtccccaatgcagacctttctccccaagtcaagattttgcaaccaaccaacaagcccacatctccatgtgggtgtctaccagcctgacataacccgtccacaactgcactcgtgggcttcccacggccccctgcagcctgctcctcccgccatcttcttctccttctcaaaggagcaactgcagctttccagcgccttaaagtcctgaactccctttacttttccaccccatcagcaaatgctgttgcctttcaagttatccagaacacagccactgctccctgtctccacaatgaccatcctggctcaagcctggcccacacaacctctcacctggtccacagcactgtgataaagtggcagcttttaccctaggcctctgcaaaggctttagggaagttggggggagtttaagtccttacattctaaataaagttcccgcattgccggcaaacctctctccccagctgcaccacaagcttcatgaggttgcaagcccttggcactgtcctctccggagtgtctagcacattgtagggccttaaaacagcctgaccattttacaaggactggatttcttctacctctcccgtgccccagccctctccctcaggtgacctgcgtgtaagagccagcctgtcacacctgtgttctgacccctttgaactccagttataaaatggggctgtatttcccaaacagagaaagtggaggctctgggcactgagaagtttatagaagcttccctcgcccctcacatgtaactcaggaagagacgcctcaccagatactctccctgccaacaccctgacctaggactgccagcctccagaactgtgaagcaatacatttctgttgtttaagccacaccagttttgtgcactttgttatggcagccccagccaaaaaaaaaatggggtgggggtggggggcctacctttattcttccagcccttaaaacacctttgtaatcaattacctgtgttcaatacctctctgcttgaaatgcctagagtggcttctcttttcccaagtgctacagcagcatttttcaaaccgttagtgctttgtgaaacaatgtcatgggtcttgccagcattaattttgaaatgaatgaagaagcaacttgaatagaatagaaagaacagaagagaacagaaacagatattttcagagtgggatcaagcacagtaagctctgtgaaacctcagcttcaatcatatattacatgaatgggtgtaccaggtcacaatggaaaattatgtctggtagtaggttgaaagacctgatttagggaccccactagccttcttgatctctgagggctgctccataaggattcaggtccttttgtcactctgcccaggatggctcctgggcagggccaggctgcatgggtggatggggatgatctgccccacctccagctgagagcccagggacccagggagttcagagtgaggctactcacttgccaagaaagcacttggggacagtgctcagctttctccggcggtccttgatgaggttcaccttcttgttcatcatcatgtggtacagcttctcccccttctccgcaatcatgacgtaggcatcacgctccatgcccagcttcaggcctacacaggggcacggtcagcactggagagagcaccaggcccagggcagggggggtagggggagacaaggggcaggcccacagctcctgaaagctggcctgccacctgccccaccacctgccctccaccaccaccacgccagcagcagctagagggcactgactgtcgctgccctaggcacctgccaatgacacctcaaaacaaccattttacagatggcaaagttgagacccagagaggttaagtcctgggatgacagggggtcatgccttcaacccaggaatcaagctctagtgctatgttcttcatcactttcctatgctgcctccccaacctgagggtgggtttctagattcacaggttatcagaaaacttgtcagtatctccattccagcccagtgataaaagtctggtcgttcttccagccaacactcataggacctgaccctaatctctgcccacatttttctgttttgacccccatctaattttgacaacagcaaatgcttttatagcacctactacatgccagtacgccacatgagaaacccgcaataataaggtgccataattatccccgttttacagataaagaaactgaggtccagagaagttcggttctctgcccaaggttgcccaattggaagtggtgaaaccagaatttagacccaggaagttggttccatattcgtgctcgtgaccaccccagccctgaggtcaggatgtggacaacacccaattctaacaactaagacccacttgggccacatccccacccgtgatcccatgtgcccaacaaagaccacaaagatactgatcggcctcacctaggccacatccctgaaccccatcccagtcctgaccacatactcagccccgatcaatttcagaagtcacaacactgcctaaccaggcccccagttcagtggtttatcgggcctaatatcattttaataaatgttggtgcaacgtttaggatcagaaaatgccacctaaaaatccagatgtctagttcctctagacaaataatccatggatttggccccgctgggcccatattcctgagagaggatggtggcttgtcttgggtggaagtagggagaagagaggagaagcggatgggtgtgacatatatgtgaaaggcagagttacagggacttgttgatctattgaatttggggagcaggtgttgcaggggagaccaggggtgatacgaagagtttgactctgagctgtggggcgaagggaggagccactgactggtatgtagcagtcgaggggaagagcaggtttggggcagaaggccgggggaaatgaagagctatgatttagacacagcaagtgtgagcatctacgacacctccaagtggcaatttcaagtaagcaggatacacatttggagaaaactgaggcccagtttcctcctcagtaaaactgggaggtggggagggtttttagggttatatgtcagattttgaaatgtgctcaaatccaagacctcctgtagcattgcaaccctctacagcaggaacttggatccccatttatcagatgagatcactgaggtctggaaagctggagtaacttgccccaaaacacaccaaagcctccttttcccagcctggtggtctctgcacaaaacagcccggtgcctccacacagttgttgcacgcccacccccaagcccaccctccaattatatccagcccctgcacttcctcatgtgaactgcttcgggggtgcctgtgcccagagggactcctgactgaggttaatgggcagctccaatggaccctcctcccagaattagattcagtgaatatcaaataaaacctcaggcggagggcacagggctatgcgcaggaaaggggagcatcttgagtcctaatgcttaagggtgaagaccttcgggcaagacccttcttttgggcctcagtttccccatttgtctagtgggcaatctctgaggtaccaccaagttggaatagtcccagagctccctgtcccttcaaatacctgcttcttacagctctgatcctcctgaaaaggaccctatgccccttccctagacacagcccccactcagaagaagccacgcatagctcagggatcccaggcgagcaccccaaagctgctgctcactctcgcgctgctcccgctcgcggatgatggcatccagccacttctgcttctcctctgccgtcttggccatgcagacaaaccacttattcttggccgtgttgtggatcttccagccgttggtgacggtatagccgttgctatggtaatccgctggtgggggcaggaggcaaaggtgcagcagagactcagccgcgtgaccttcaacactccccattgccaagcccttccgccccagcacaggcagggccctcgcctggatcaggatggggagctggacttccagcccttcaaacgctcacttcttatccttttccagtgggcaaggaagaccttctgcaaacaaagacccctctcaaccactcaatgacagggggcttcattttaagaccttgcatctaggcacaaacacagcagtgactcatggggagacacttgcttggagccccaaaatgcttcctgggctcctcccatctcactcgggcactggagttacttaaaaccttagtgccagcctgacaagccaagtcaaacgtgggacccttacccagtgctggctgggatgggacctggaaaacctctcaaacagattggcatgatctagggaagcgaaagcctgaatctgaggagggctccacgggcttcatgagactgccaaaggggactgtggctcaaaaccaagcaagaacccctgctctggacaagctcaaaagcacacatactaggagatgctcacatgagccatcagtgactgcatgactgtgagtggtggcaacaggccaaacatccatcacccaaagaatggatgaagtgtgaaatgttcacgtgacggaacactctgcagcaatggaaaccaacaggctgcaaacagctacatgcagagacatggatgaaccccactaacgtggtgttgagtgaaagcagtttgtttaaaaaaaaatgtagaccatattttctgggcggggagactaggtgtcgctctgtcacccaggctggagtgcactggtgaaatcatggctcactgcagcatcgaactcctgggctaagatgatcctcccacctcagcctccacagtagctgggaccacagttgcacgccaccatgtccagctagtttttgtattttttgtagagacaggttttctccatgttgcccaggctggtctcaaattcctgggctcaagcggtctgcccatctcaacctctcaaagtgctaggattacaggcatgagccaccacacccagccgaccatattttatgaccatttaagtaaaatggtcatgaccattatatgaccaggtgggctgtatatacatgcacatatataattacatatatgtaaagccacttaaacatatgtaatcatgtaaccacttacataaggctcaaaaatagaaattttaattaaaatgtttagtcataaatgcttaggaggtaaaaatgtctttaaaaagcaagaaaatgatcatcacaaaattcagacagtggttacttctagggggaagaaggcattgcaaggaggaaggatttggggtgcagtgttttatttcttaacttgaatgctaaccacccagatgttcgcttcatgcatctatgctctgggcacttttctgtaggtagattacatctcatgataaaagaaaaaaatatatttaaatgaaacagagagagtgccagggagcaggcagggctcaggcagggctcaggcaaggctgggggaggggctacctgtcccatcttccacattctccacctccatgacttcagtgttgattcgacccctgaagatgtagagggagccgttgatggatttggtcctcttggtggacttcttgctcccggtgaccctgatagacagtgagaagtcagtgtcccctacacgtcacctcccagatgcaactgttttcaacagcgcaaaggggaacacaacactgaggggcatccaggggacagagaggagccccaggtaggggtcaggagcaggagtgtttggctggtgctggggtaacttgaacaagtcacttctcttccagccacagctttctcatctggaaaacaggctaatagccttgctgaccccacaaagctacttttcagctaaaaggagacatgggagaccaacaggaggtaacagaaacccattcttcttggctagaaaatgaggaaagacctgttaagtttctcaaagacaggaacttcctgaaatacgaccagaatggaaggagggcttggaactggcagtccgtccatccatccatccatccatccatccatccatccatcatccaccttcccagggttcaatcattcactcgagtgaattctatcattcacccactcctatagtctaaatgttggtgtccctccaaaattcatgttatatcctaacccccaaggtaatggtattaggaggtagggcctttgagagatgaagaagtcagggggaaaaggacctcatgaatgagattaggcccttataaaagaggccccagagagctggctcgcctcttccaccacgggaggacacagcaagacggcaccatctatgaagcagaaagcaggccctcgccagcaccgagtctactagcacctttcatcttggagtccacagcctccagaactgtacaaaatacatttctgttgtttacttattttattttattaatttattttatttttttgagatggagtctcactctgtcgcccaggctggagtgcagtggcatgatctcagctcactgcaacctccgcctgctgggttacaagcgattctcctgcctcagcctcccgagtaactgggactacaggcatgtctcaccacgcccagctaatttttttatatttttagtacagacagggtttcactgtgttagccaggatggtctcaatctcctgacctcatgatctgcctgccttggcctcccaaagtgctgagattacaggtgtgagccaccgtgccggccttattttatttatttatttttttgagatagagtctcattctgtcacccaggctggagtacagtggcacaatctcatcccactgcaacctccacctcccaggttcaagcgattctcctgcctcagcctctcaagtagctgggactacacgcatgtgccaccatggccgggtaatttttgtatttttagtagagacagggtttcaccatgttggccaggctggtctcgaactcctgacctcaagttatccacccccctcggcctcccaaagtcttgggattacaggtatgagccaccacgcccagcccgaatttctgttgtttaaaaaccccagtttctggtattttgttatagcagcctgaagggactaaaacagtcactcaacaaacatctggccagagcttcctatgaggaggataccaagtcaggagccacgggaagtcactcatctgtggatccaacaagcatgtggagaacgcctactatgtgccaggcactgttttaggtactggggttgcactgctgaacaaaacatctctgggaactcaacttctaacatggggttggaggcagggcacagagacagtccctaagcaaggtaaaccatacatcaggtcagaggtactaaacgctctggtgaagatacggcagaaaatgaactcccagagctcaaaggccacttggtggtgtgcacaggcctctgctccagcaggtgggctgtatgctcaccaagagccagtgggtttgttcccacgccgacttggctgatgtgtacttgttactgtaagtgggtaaatgaaataggagataggctgaggattcaggaacgtggaagagacttatctctctgaaaattaagttgtaagtggtgaagatgtgggcttctgctgtgtgtgagatgggagccacggagggttggagcacaggcagaatgggatggacttcagtttcaagagactccctgtgtctgccggtggagaagggactagaaccagaggggagaccactgcaatcaacaagatgagaaaggatgagggtgtgtatgtgtgtgtttgtgtgtgtatacacacacatataaacatatacatacatatgtgcatatacatatttttgtaaactttgtattaaagtataaaatccacacagaaaaaaaatgcccaaagaagcattaatatggctcaattaacttttgcaagtgaacacacctgtatcaacatgtttagctccccacaggcacccccttatgcccctttcccatcactgccctcttcccctgacaagggtaaccactgtcctgagtctaaccccatagatttgctttgcctgtttttgaactttacacaaatggaatcacaagtgtgtacttttgtgtccagcttccttcacccaacctcatggctgtgagttacccgtgctgctgggtatagtgacatggccagacatctggcttccttccagtgtggtgctgctgtgacattcctgcacgtgcctgacaaagaacatgtgtgtgcatttctttgggttagatacctgaggagctgaattactgagtgataaggaatgtgaatgattagctttaggagatactgccaagctgttttccaaaatagttgtactgattttcccatgcccaacagtgtaggaacattccagttgtcccacatcctctataactggtattttatgtctcattttggccattatggtatgtgtacagtaggagctcattaatatttaatttgtagttccctgatgagtaaataacctcaaccactgtatgtttattggcgatctggtgccttcttttgtgaaatgactgtcccttgtcactttttgttgaactgtctgtctttttcttaattacttatagcagaggttggcaattttttttctgaaaagggccaaatagtacacattttcagttttgtaggccatatggtctctgttacaaactattcaactctgcccttatggcatcaaagcagctaagactgtatacaaacaaatgggcatagcagtgttccaataaaactttattgacaaaaataggcacagggccaagtctggctacagaagggcctcttcatatattctggatgtgaatactctggccattatacaaactgtaaagaccttttcacagtctgtggcttgtcttttcactctccttacagtattttttaatgaaattcttaattacagtatagtctaatgaatttagttctcctttataactatactctttgtcctgtttaagatatttgcttactcctaaatcatgaagatattctcccatgctttcttgtagaagtgttattgttctaccgtttacatttaaatctataatccagctgaagttgatttttgtgtttggtatgagataagggtcaagaatcactttttcccccactggatatcaaactgaccaagcaccatttattgtactgcattggtgtttttgttgaaattcaaatgactgcttacatgtgggtctactcctaaactcactattcgattccattactctacgtgtctgttttcataccaataccacactgtcttaattactacgaccttacagcaggacttggaatccagtaataacggtcccctagcttgaccttcttcataattgtcttagctatttctatctctggattttcctgtaaattttacagtcagctgatcatttacacacacacacatacatacatacatacatacatacatacatacacacatacacacgtacacacgtacacaaaccccctcctagagtatttattggaattgcactgaggttctgggcaaagtttgatgacaggatggaaaggacttgctgatgtagttggtatggggataatgatagctcaaaatcaagaagattctggcttcggctcctgggcaaatttcttctcctgcctccagactcaagcagatatcagctcttcctgagcctgccaatcctaggatcagaacgacactattggcttgtcttcagcttgcagacgacagatcttgggacttgtcagcctccataatcacgagtcaactgcttattataaatctctttacacacacacacacacacacacacaccctattgggtctatctggagaatcttgacttaatacaaattttggtaccatttactggtaatgaggaagatccaaggggcagaagttaagacaaaaaacaagagcccctttagacacaatttaagtgtgggctatgtgtgagacacccaaataaagatatatgtatttgtatttcttccacttgaccacgcaccaggccttattctaaccacattacatgtgtacctttacatgttttactctataaaaacaaccccatgaaatgaggactacttttatccccatataacaggtaggaaaagacaggcgcaaacagctgacataatttgctcaaggtagcacagatagtaagcagagcctctgtgttctttttttcttttcttttttttttttttgagacagagtctcgctctgtcccccaggctggagtgcagcggtgccacctcagctcactgcaacctccgcctcctgggttcaagtgattctcctgcctcagcctcccgagtagctgggattacaagcgtgtgccaccacacctggctaatttttttatatttttagtagagatgggggggtttcactgtgttagccaggatggcctcgatcttctgacctcatgatccaccctcctcggtctcccaaagtgctgggattacaggcgtgagctactgcgcccggccctctgtgttcttaatggcgacacactactgctgcctctaagatgctaagcaggtagttgagatgcatgagactttgctcttctgggtcctggtttccccttctggaggatgggaggtgggtttttaaaacactccctcccgttttccacttctgacacccaaggagcctctgcttttgaattcgcccagaagcactgtgagtcagagacctcccctgacccatatcctggatgggtggtgccctgcatgacccaggcaaggacaaacacagtcagcagtcaccaagtcactccaggcattgcctgcacccacatcagactcaggtggggagatccacccaccattgcccaatctcctgggcctctcagagctcagccctctggctctccatccagaggcaggaatgctggccgcctgccagcttctctcaagagacacatgcgccctttccctgcagccagcccagctcacttgtggaagtgaggtggggaatggccttgaaagagctcagggtgcccacaaggaaggccccagggagcccacttggaatccagtatcagaatcagctgctgtccctgcacaggtgagacggccccagaggaggcagagcctgcacccggaagccaaaggttgagtaaactcatctaaaagttgggagcaggtcacagaggcctaaagggacgttctgttttccaaaccccagtgttctgggaaaagtgcctgctccagactgcttggggcagagcggcggggcagggctcagggtggacattggcagcagccctgaaactacccaagaaggactctgaggacagccccagagagaccagaaaggaggcagggaaagagaagaagggggcgttcatgaggggacagcaggacgtgagatagacagacctcaaggagtgggcgagaatgaaggagcaaatgagaaagagccatgctgagccagccactgggagatagcggaagcaggaggtccaggccctcacaggaagggtcaagcccagaacaggggggaaagggcaatggggaagggcctgtggtttcagagcctcctgtgcaccaggtgctgtacctgtgcgaccacaccagagccaagttaacaacaatggtgctggcagctactgtgctgtgcactcactatgtcccaggcacactcacatatctgatcttccgtggtcctaagaggtacatacgatcattcactctgttttacggatgaggaaactgaggcacagagaggcaaagtcacagagctacaaaagaggttaaacggggatccaatggcgggcctagctcttaaccaaacactactacaaggaggggctgatcgtctcactttacagaagagaaaacaaaggctcagggaggccctctagaggaggaggacagtgggaagcccacacacgggcatggagcatccattactcatccagtggtaaggtttctcaccacaccttaggaggccagcacagacagacaaggaaactgaggctcagagacggtcagtggcatggcctaggacacaaagcaagttacaggaaaatgctgaaagtagggcctaagacctggacctcaggcctcagctctagtctttgctagacagaggagttaagaagcctctggaacatcactattttgttcctaagacaaagtaacagcaaagagaatttgaaaagtgctgcaggggtcagctgagaccatcctatacctgctgaacatgaaaacttaaggtcaggaatctctctgtgccaatccacccacccacccatgcatccaaccatcagttcccaccagctactacagtcatccaacccccacatccatctcctaatttcccctctctccaatcattcacccatccattcactcagtagtccaactgtcccactttccctcccagagcccaaccacttcggcaactatcaaccaaccacttacccatccatcaacatgccaaccaattggccatccatctactaatctccaaacctccgtcaccaacccaccttcccaattatataaccacccagccttccatccatctatccattcactcaacacaccatacctgaaggccccaatctaccattcatctagacacatatctgccagtcttcatatccatttctctaactgcctgaatatccacacatgcccccagctttccatctattcctccatccagccatctcctaaacctccaagcattcaaacactcattcactcacacacacgtcaattccaacatccgtccacattccttccttccctccctgcctccttctaccatccattcacctcccaaacccccagccatctgcgcctcatcccgtgtgcccacacaacccgtcaccacacttcccatcacacatgcacctgcctccatctacctactcagccaaccatctacttactcctagactctacagagcgcaagaagcaccagtgaaagacacaaagaaggtgaagaaactatcctgaccctccaaaaactgaatagtgaaagagcttcgctcctcttgaaccctcaacttttagagcttagaattacaggatgtgggtgtcacaaagaacctctcagtttccacagtcatctagacctgtgctatccaatatggtagccacgagccacaggtagctactgggcactccaaacgtacccacgacaaatttaggtgttttgtgagtataacatacacaccagattttgagaacttagtgttaaaaaacaacacaaaatatctctttaataatttttttaaataataattacatgtataattataattgaataaaatattctcatatttggggatctattaggttaactaaaatatattatttaaattcattttacctgtttctttttacttttttaaatgtggctactagaacatttaacataacacgtggcttgcattgtattcctactagacagcactgatgtagaacaaacccctcaactcacaggaaagggaggcccagagagggaagtgacaagcccaaggcatcacctggagaaggcagcaggccagaccccatcccagcctcctggccactcacctggatttccgcttgcagtagacgagaaggttgtcgaagaggaagaaggccctttcctggatgttgcccgcagagatctttaacaaagtcccttgcaggaggagctgagtgcagatgtctgtgaggttggaaccctggaagcgcaatgaggacacagtgaatgagccaacccaggaacatccccttcctttcccagagacagaacctactaccacctcctgccacatgccaaaaactccaccagcaagtctgtcaatggacagaaaatcaacacaacgtgattagtggcttctatctgctgagcatgccatgaaaatcctggggagggcacactgatatgaccgcatgtcccttttacaggagagggacttggggctcagggaggagtgactcacccagctcatacaggtaatagtaggtcctagtcaacatctgggtatattttggttcagtttttggtttttgggtttattttttttaaacggaatttcactcgttgcccaggctggagtgcaatggcgcgatctcggctccctgcaacctccgccgcttgggttcaagggattcttcctgcctcagcctcccgagtagctgggattacaggcatgcgccaccatgcccagctaattttgtatttttttagaagagacagggtttcaccacgttggtcaggctggtcttgaactcctgacctcaggtgatccaaccgcctcagcttcccaaagtgtagggattacagacatgagccaccacgcctggcctcgttcagtttttattgtgggtttttttttcacctattccttccccactacttatttatgtcttgacttgttactatatctcccccacctaaatgcccctttggtaaggacagggcccgaatcaactatgtgccctacgtatgcccagcacccacaacactctctggcacacagtaggtgctcaacaaatgcaatgtgcaaaccatcgggggcaggatcctgtgggcatttcatctagctaagctaaagatttacacgtcaatcccaaacctggtcacctatgttgagcagcaggggaaggggtgacaaagacgtgcatgaagttcactgaatgtcagtgaggttccgggcagcgtggctgggaaaggcatcagggaggagtgagcagaccttggaagacaaaaattaagataaagaggctggccgggcgcagtggttcatgcctgtaatcctttgggaggttgaggcaggaggattacctgaggtcagaagttcaagaccagcctggcaacatggtgaaaccccatctctacaaaaatacaaaaattagccaggcatgatggcagatgcctgtaatcccagctactcgggaggctgaggcagagaatcgcttgaacccgggaggcaaaggttgcagtgagctgagataacgccactgaactccagcctgggcgactgagcaggactctgtctaaaaaaaaaaaaaaaaaagataaagaggctgagggcagggatgggaaggtcctagctgggagggatccttagagcctgggatcacacaggtctccctgaaaccaagaggacccaggcaagggcagagagatcccaaagtccaaagagagaagaaaagagaccttggtgggcacagaatgccaaatgaggcagcccctccgctgaccctcaatccacgtccctcttctgtgattttggggaatggagtcttccctggtacttggctgcccagccacagactacatctcccagccccccttgtgccaggtgtggtcacatgactaagtcatcaccaatgtgcctccctgccagggcacatcctcgaaagaaaatggctttcctccctttcctctttccagaggctggggtggtgggatacactgcagcgggtggtgggatacactgcagcagatggtggggcaaggagctggagggaacctgggtcctggcagagcaaagctgcccaccccagtctgactgtccgcctctgcactgctaatgagaacagcgttgcaacgctaatgagccacctccctgaggccgctgcatcgcttccttacagcagtcaaccacagactttaattaatacaataaggtacagacaacagggtgccacggacatttaggcccaaggaatattatgcaaaagcagtgttttaagggagtttcacgtgacagaccagcagattacactgaacaaagaaacaagaagtgatgttgtccctgcctggaaatgaacttggggaggagagagggagaattattcacaaaatctccttccccaaacagtcaacacccagaaccaacatggagctcctaccccactgggacctgctgactgaattctttctgagacccagtaaggagaactggttccggcagctgagaagccaggctgtctgctaacggcctacaaggggctctctcgctgctgttagggctggtctgctctgtgtccgtggtccagttgggtacaacaaacccattcactcaacagtgccagagacccctctggagactggggaagcagcttccttgtggtcgagagctgtgcagccgggacaggagcctgcattcgttatcacacatcacggccttcggcttggctgggggccaggtgggcatggatgctggcatgcccacaggcagatctcagctttccagtgaggtagcagcctgccgcaccaagactcagggctgtcatgaggaagagcccctgggacccccagcatcctcgcgaactccctggggcttcatcatggcccatgcgcagcacacggcagacaaccggttcagcagtccctggagcccacgtgcctccccttccttttgccttggctcccttatgcccacccaccagctcttccaggctccaaaggggaagttgaagaagaatctggtacctggcccagctgccaagccccaagatcacacagccctagaaccctgctgccaagtccgtctcgggggacctaggagaggaagtccgccagcctgggaagctgcctctccagccttggccaagcaccacctggcaaactgcagctgaaatgccgagcacactacagggggataccccctccaccccagccctgctgagaagcccagccgcactcttgatctccctgaaatccttgaatctaggtcaagggtggtgctaggggttggatgcacagggaagaggctgagcaccaagacatgtggaccagtcaggactagagacctccttccttccagacatgcacactcagccacgctggagatgacaaaaccttacacactcaaagccaatacatgcgtaggggcggccacatgccacgcactgttctaaatatcttgtacaaactcagctaatcctcaggacaattctcattttacagatgaggagaccgaggcacagcgtggtgaagtgacttgttcatggtcacataggtggtaaggcagtgaggtggaacttgaacccagacaagcagcctccactcccccgacctgctcacctctaactcaggccgctcttcgaagacaacctgaagatttttctttgcaatcgatagtctagagcaggagtctccaaggggagagaccatgtcccactgggagcccaaagcactccagggagggtaggaaaaaaatatgagagcttttgtattgattttgtttcctcactcctgtttccttctctccccttgtgggtgagggcgagtgagcagttgatcatctcttaaaccagggctgccagagccagagccagagccagaaaatggagtgccttccttccttcctttccttccttcctttccttccttccttcctccctccctctctttttttttgatggagtctagctctgtcgaccaggctggagtgcagtggtgtgatctcagctcactgcaaccacctcccaggttcaagcgattctcctgccgcagtctcccgagtaactgggattacaggcatgctccaccacacctggctaatttttgtatgtttaatagagaaggggtttcaccgtgttggccaggctggtctcaaactcctggcctcaggtgatccacctgcctcggcctcccacagtgctaggattacaggtgtgagccaccgcgccaggcttgtttctttcttcttaagagtacacatttccttttttatcactgtgagcttcacatggaagtccatgcggctgcatctggagtgtgcctctgaggaggcgcagcccacgctgggcacaagttccagtcaaagctcttggatactttttccatctaaaaaaataaataaataaagagatcccactttgctgccagggctcctcctgacatgtattgggcgttttctctgagccaggcactgccgaggactctgtaagcatcaactcccccgtcctcaagtgacccatgacgggggtactcccatgatcctgacttcgcagatgaggaaactgaggcaaaggaatctctccccacggagggggttgtctcattcactcacttgcaaggtattgtgacacactgccatttccttgtgctcagcaaaatggattcgtggattcacttatctggttttatctaaaccagtctcacgacaaacagtggctcacaaaggatcagggggtaaaaaacacacatatgggagatcaaattcatgaatgatgcaacctcaagcacacagcaagaaagtggccaaaacaagactcctcttgctccaaaaacaagccccttgtcagacatctttcaagagagagatgacagctatctgatcagatcagcaagaggtcacacagaaagatgggaaaggatcaaaagaatatgtcaaataaagatgtgcaatcgcatcattaacatgaactaccccctaaggcatgctgtcctcagagactgtaactactaacagatagcatggaagcaactccactattagacgtcattttttctagctagaacgtattattttcacaagtcaccttgaggaacaaactgcattttaaaaacctttctacttcatagaaaacaatttcacgtttttcaaaggacattcatattccacacctcactttatcttccaaatgaaaccaaaaaaataacttcagagatattatcactaaaattaaacaaataggagaaaataaggcacaccaggcaggacaaacttactcgaggcagggcaaacttactcgagacagggcagtctataagttacagggctgggcctcaaaaccaagtccctgtgcctcagctgcctcatctgtaaaatggggataatagcacctcccttgtagggttggaagcttgtaacaggtactaaataactgccaacaattcttattttaaggcactttatttcctattgcatccagcaacactggccactgagggccactgagttctcaaactgtacatgtttagggtcataaagggttttagagacccttggtttccatttgcctaggcccttaccagaaaaaaggcatctggaaatcacttctgctgcagctgctgaggagcttgctcaataccctctcctttggggcccatgtgagaaatttcttttccaactgagtgccaggaaactctctgtctcccagaagaactgctctgcttcttccttttctgacaatattaggtaacttatgtatgttgctcttttcaccttggcttccaggaaactcaaaacccatatagacagatgtttaaattagtcacctctatttgctcttgaagttcaaagtggccatgtgacccatttctggccaatgcaatgaaaggggacacctgtatggggcttctagaaaaggttttcctccaccagggaagagatctccccactaactaccctggccatgcccctgtctcctccggttttgaacacatggtgcctggagctgccgccttcatggaagcatgagagaaagaagaggctcaccagagaccaaatcagagctctgacatcacaaggctgagatgagagtcttcgaggatgcatcctaactgacgcacctgaggatcaggcaactttcagatgcaggaaacagaaaccaagccacgtacttttaagcaaaaaggaatgaggggctttacttattcactgaaggggctagaggagccaggaatccaggccgagggccccaggaaaccagccacaatgcagaactcacccaccaggggagccactgcccctgccccaggtgggaaaggagaatcagaacatcacctgtccaagctcaggctccaggaaaaggctcctcaggtggcatcaaggattcagtagttgttgcctcaactgttaactgcaaagccatcccatggctgctaccccaccaacaataaaaaaggaaagcctaggccatgcatctgacgcacaggaagctggcgcccgggccctcttctaacgttaccacggaaagccaaacacaaccatggctgtgctttgctgcaaaaatagcacaaggggtggcctccaccccacttccaccttccaaatctcaagcagctggatctgatcttggccagaccccaaatcatatcccaaactgaagccgggaaatagagctcttcactctccagcctcggctgggcaggaaggcccagcagaaagagcgcaggggacatggcaagtggattgaccaatccacaatatccacccctccctgaatgcagcccctctcctctctgcagccaaacccgtaacctcacagcaatacagcctcacatttaggattccccagcacggagaaaagaactagaaatctcaaatatggcaagtgactccaaaggccagaaaatccaaagggcctacggcatatgattcacgtaacaatctctgcccaagagactttcatcttccctcttaatctcctgttccagctgtatttactctgatatggatttttttcatttattcatattttcccatttccttctacggattcacaggaaacctctaataatctaaggaaggcaagggggcttaaatccaatgatctcaagaaccccatcccctaataatcatgatagtaatactaacagctaccatttattgagtacctactatgtaccaggtacagatgaggatactgaagttcagagaagtgatgacatttgcctaaagtcacccagcaaaggagtgtcaaagccagaattctgtcctggagtggacactagaacccgacccttgacgttggcatcaacagctcaaaggcctccacataccaggcaatgcatgaaagagaaggggtggggagataacagggggtggtggggactgaaggaaactagaggctccagtgactatttccatgagatataggggcccagtgtcaccaagtttttaagagaaacttgaaatgcaaatttgtatttggatttaattgaaaaataattaagcaatcttttgcaaacactgtaggccaaacaaaatacattgcagactgacaggtgcccaggcctcagttcatgactgcacctgtgcacctcctggccccctgcggcccaggaagccccctcctgtcctgtacacacctcccagccttcgatgtgggactgcagctgctccagggcttccagcttctccatctgccgcttggtctcattgatgttggagcaaacggtcttcatggcctgcagggcactctggaccgcggggtggtctgggtgcttgccgggagtcctcttggccagctcctggggtagaatagaggtggggagaagaaagcaagacatcaatcaatccagaggagacccaggccagagctgaacccaagaaaacagacaaaaactcctcgcctggtggacattacattctagtaaaggagatgagccaaagcaaagaaaactcaggtatggaatccaatgtcaagcagtggtaaacactagaaagacaaatcagaatgagggagagggaagcattgtttcacaaggaggtcaggggaggcctctctctggaggtgatgtttgagcagaggccctggacagagcaagagagagagccctgcaaaaacccgaggggagagcctgccgggcagggggcaccgtggtgcgaagggtctgaggcgggcacatgtctggtatgtaatgaggaacagaaaggaggcagtgtgtctggggtggaataaacgagagagagaaaaacagagagatccgcggtcacagaggcggccccaacactgctcctccccaggcccggttttcttatcataagatgggcataaaaaataccccaccttcacaaggatatgggactgagcaaatgaagtggctcttaatccatgagaagccccctgcccccaccgtttcccactgccagctcacccctcaactcagacgcaggctgggacattgcaaaggccaggccagtcttaatcgaacattccagccagtaaatgtgatgggagaggaactgaggaggaagggatcagctgggacttgagatatcaaggaagatttttcaggccaaattacccaaatcacccaaccgcccccgtcagtctttcatcccgaactgtgctggcagagataattttctttaatcatctgacccagaaacacgcccaatagctccagtctctcccctatgccctagctctctgctccctcgacgatccagataacatccccgcagatgtgacactcttgcatcgtagttacgagcacaaatgtaggttcaagggctgactctgcccctcactgtctgggtgaccttgggccagtcccctctctatcccgggcctcggcttcatcatctgcaaacctgtgatgatgaggatgatggtgatgacgatgacagcaattaatgtctactgagccttcgccccacggttttaaggtggcttctgttattagaccatttaacagatgggcggactgaggcacagcaagaaagcctaaggcctcgaagaagtacaaggaggaactgggatttgaacccaggctgcctggtgctgctcatggttgtggtaagcaataaatgaggtactgtaggaaaagcaccaagtacatatatagtaagcactcaatatatgcgagccattagcattctccttgctgtatgacaacacgctagctgtaactgtgagcagcaatttgccacaaaagggtattgttctgagcactccctggagtaaaccaacttcaaacacatcccttcttcattcacttattttcttccctgtccgaaaacaaacatcctattttctgaagaccaggtcctaagattcccaaggcccagctggtctgcatcatcaggcccctgggactttgctgagctcttgccacgcacccaggcaatgtgcccaaaggatgcaaaagaagggagatggagccctgctcttcctctggaggccccagcaatgaggctggaaaggcacttccctgggggcttgagaaaggcccagagagcagcaccatatcctgaaaatgctggtgatcaatcaaaagagaagcaagcccagaaggcttcaggaggaagcaacacaaaggcaggcagggcacccagggccagctctgctaatgcggagtgtatttcgactcattcttcactcagcaaatactggctgagcaactggtgtgagcctgagctgtggaggctgggcaaagaacaagatggtcctctgggagctcatggtcaagagtagaccggtcaacaaggtaatgactattactactaccaacagtaacaacagctaatactcagcaagccctcaagctcctgtcaagctcatttgatcctcatgtcaactctctatcaggtaggcaccattattcttctcgattggcagatgcaagacctgaggcacagagaggtcagaccgtttgtccaaggtcacacagcacatctgagcccacccagtctgactccagagtttgtgctctaaatccccgtgctatttacgacttttcagacagttaagtacaaatactttcctctcaaataaatatataatttatagaattaaagggacaatgagtgagggaagtgccgtggtctgagaaggtctctctggaaagacaggcttgcgagcgaagcttgaatgaggtgaggccacgggccacactgcgtctgcaggaacagcactccaggaaggagaagagcacgtgcaaaggccctgaggcagcgagaagcagcagggaggccagcggagctgcagcagagcaagtgagcgagagggatggaccacagattcagacaagcatgccaaggccagatcacatgaggccgcagtggggtgtttgggtttcctcccaagagccatggggaggtgatgggggtatgagcagaggcctgacaccaccttctcaccctttaaaggacctccctggctgctgacaggaggatgcacgggatggaatgtgcagtgaatataaagtgggaagaccagttatggctactgccaaagtccaggcaagagcagagggtggcacagaagctctgtgcctcattcactccatgcatgcatgtatccactcagccaggctccagtgtacctggccccatgttgggctctctgttgtacacagatgacggcagacactcccctaagccatcagcctgcttgtaggcatgtccacaaagttacaatataagaccgtgatcttatgaccatattcagtaattccattcgatcctgcaaagctaccccagtcccaggttccctgaagtggtttttggcatctggacctttgtgaggccagccgaggccagggagtgaatgtggccagtcagctcccggtgggcagggacagaggctgccagttagtgagacccccgccccaggttctacccatcatccctttcatccaaagcaggggtcaaatgacagtccaaggactgagtccaacccatcacccgtttttgtaaaaaaaagttttgtcggaaccaagtatcctcatttcactgatatattgtcagtggttgcttttacactacaatgacagattgtatggaccccaaggcctaaactatttactatctgatcctttaatggaaaagtttgctggccctttgttaaaagcaacagaactgattcttagctgagcatgagggcacctggaataaaggccacacgcccagtctgcctggacacaaggttctcatggatggggcgcgagcagaagtgccgggtgcagtttcccttctcctttccctcttccttggctggaatgtgggcatggtgcgagcacctgaaaccctggtggtgaggggcacacctcagggttggcagaacttggtgctgtcagcatggagccaccatgctgccctggactgccttgacagaaataagcttagacgttgtttaagccactcttgtttcagagctatgtcactgcagctaaaacatatcctattacaaaagaccccaccgtgttgtggcacttgggataaattcaccatgaaactgtgttcttccttctgctggctctgttaagcttggccatcagtgaaattactttgcctcccaatggccctagcaggcaggtgcttttactatccccacttgacagatgagaaagttgaggctcacacagaggcaaggtcccctacccaagggcacggacagctaagcggctacacggtccagctccagagctcacatttctgaatcactattctgtgattctccagcctgaggccctgggcctcttcccacctcccccaacaaataggaagctctcaccacttttattcttgaagctaaaacctgatgggtccatggcacccctctgatgggcactgccaccatatctgctcctcccaaaccctggaagttggaatctcagtgaccctcctccagtggttccctgtggggctgccaacacccagtagttagtaaaagtgaaaaaaaggctgcttcccttttctatctgtccgcctctatctctattcttgctctaggtcagtggtaggggtagggaattgaaaccaagcaagacctggccaggcccatagctggaccaaaaccgcaggggaagtgttagctttggtgtcttggttcacggggcatgttggctccactctgtggagctccaaaaaatgagggcccattcctgcctccaggcctttggacttgctgtttcctctcccggcacactcctcaagatctcaagaagtaacggccacagtggctcacgcctgtaatctcaacactttgggaggcccaggcaggcagatcacgaggtcaggagttcgagaccagcctggccagcatggtgaaaccccgtctctattaaaaatacaaaaattagccgggcgtggcggcacgtgcctgtagtcccagctacttgggaggctgagggaggagaatcagttgaacctgggaggcggaggttgcagtgagccaaaggttgcggtgagccaagattgcgccactgcactccagcctgggtgacagagcaagactccatcttaaaaaaaagaaaaaagaagaaataacacaagccaggcatggtggctcacgcctgtgatcccagcactttgggaagccaaggcgggcggatcacctgaggtaaggacttcaagaccagcctagccaacatggcaaaaccccatctctactaaaaatataaaaattagccaggcatggtggtgcacacctgtaatctcagctacttgggaggctgaggcaggagaatcgcttgaacccgggaggcagaggttgcagtgagccaagattaagcccctgcactccagcctgggcaacagagtgagactccatcataaaaaaagaggcaacatagtactgtataaagataggcctagagatcaatggaaaagaattgtaggcggtggccagcagttcaagaccagcctgggcaacacagaaggacaccatctttaccaaaaaattttaaaaacttagccagacacagtgatgtgcacctgtagttccagcttttggaaggctgaggtgggaggatcacttgggcccaggagctccaggttacagtgagttataatcgggccactgcactccagcctgagtgacagaacgaacctgtctctattatctcttttaaaaaaaaaaaagagagagagagataggttgataggtgcagcaaaccaccatggcacatgtagacatatgtaacaaagctgcacattctgcacatgtatcccagaactataaaaaaaaaaaaaaaaaaagaaaatcaaaagtaaaaatcaatgcatatcaaaaaaaattgagagtccagaaataaatccttacatttatggtcagttaattttccacaaggatgccaaggcaattaaatggacaaaagaactgtcttttcaacaaatgatgcaactgaatatccatgtgcaacaaaatgaggctggccccttcctcatgccacacacaaaaatggactcaaaatggatcacagacctaaatgtaagaactaaaactataaaactgtcagagaaaacacaggagtaaaccccttgtgaccttaagttaggcgaagtgctcttagatatgaccaaatgcacaagcaacttaaaaaaaatagataacgtgaatttcaccacaatttaaaacttctgtgcttcaaatgacactaccccaacgtgaaagccaaaaaataaataaaatttaaaaggaagggaaaagacaatctgcctaatgaggaaaatagtatcaattacacatctgatgaggaacttgtacccagaatatgtaaagaacccttacaacttaacaacaaaaagataaataatacaagtaaaaaacaggcataggacttgaacagacatttctccaaagaagatacacaaatgtccaataagcagatgaaaagatgttcaacatcatgtgggaaaatgcaaaacaaaaccaaaatgagataccacttcacatctactggaatagctataatccaaaacatgaataacaactgttggtggagatatgaaaaaaatagagccctcctacattgctggtaaaaatataaaatgctgcagcagcttaggaaagcagttgggcaattcccttgagacaccatgatccagccatacctgaagccatctatccatggcttgtcagttatgtgagcctatttattttttacatatatatgttgtgtaagtcagcttgggctagtttttccatctcttatttgaaaaagttcctactgcttcacagtctcagagggagtgcacagatatggaaactcgaaggtgtcccagctggtctcagacaggcataaaatgtgggtatcttcaaagccaacgagagcttgagcgatactaacaaaggtctaacatgcgaaaggagggaggtgagaaggctcctgcccaattcagaactgaacagactgtactaataaatcagaatagagtcacattcaaaggagacatactatggtactgaaaaccctggaatccatatccaaagtggaacagatacatgaacttccagggtttggcccagagaagagtatttctggaaggaacccaagaggtgcttgcttgcttgcttgctaagcgtcttgggagaactacatgactaagaggcccggtgaatctgtaagacctcaaggagtccaatgggaccagtgcaagagaccactgtttgaatgaattaatccattcttacaccacttggagctttctcgcaagagagagggctaccttgtaaggtagtaagttccccatcaatagaagtatcaatgatagattcaggcccactaatgccttattctagctcaaacccattatcagatgatgaaactggagagctctgtggtcaagagaatgggtgctgggaaaagggaggcatggtctctacttcgcctccaccacatctcagctgtggggccttgcacaagtggcctcacctctctaaagccaagtgtgtgcatctgtgaaggaggctaagactcaccccctaaggctaatgtaaggatccaatggggtgatgaatgtaaaagtcttggtacccaataaggacacaatatttatcatcatcgtcattatgtctgtggtaatagtggctatttcttatgatttctgcatagtaggaataatagtgaaaatagaagtcgtggtaatagtcctaatagctagcatctactaagtacttactgtgcaccaagcactgctcgaaatttaagtgtattaagtcatttcatcctcgaatcatcccagtgaggtgggtactattatcatcccactctatatataaggaaactgaggcacagagaggttaaaaccctcttgcccaaggccacagagacagaaagtgggacttggcagatgccaaccacatctacaggcccctctagaaatagtaatagctggaaatgaacacctccaaatcagactcttagaacacaaagtgtctaagtagggcaggtcctggggatcctttagaaaaactgagtgcagggaagagaggggtgtgccagggctaccctgtgaaccagcagcattagcccctccaggagccaggctgatggccttccccagcatccgcccctcgagtcctgtgtggtttcgcgagtggggccccaagcgaaggcttcctagaagagaggatgttggcgcagagaagcctgggcttccgcgagatgcctcacctccctctcgcccctgcaatcacatttactcaaaggatgtccaaaggtgcccgctctgagcagccccttcatgtccccaaaactgtgtcatcagctcccagcatggccgtaagaggcagcctgaggcgcagggcctcaaacccaagggcaacaaacaaacgtggctagagccagctcctactggctcactcagcttcaccgaaggcccagctcactcagccttatcccaaggcccaggagaggactgggggaagaacaaagggctcagaggaagaggaggtggtaaggagagaggaggatgagctgcagaggtctactgcttccacctgctcctctctcgggccatggagtccaggagaggtcaccccagccagctcccagtgtggatctgtgactaaagcctgaccttccatcctcccagccacacagggagagtgtgggacccatgctgagccggtgggcctcaggctgggacttcctacgcaaacgctgggaaaggcatgctctcctctccctgggtgggtacactggtcacacacaggcctgaggctgctggtgaccaacgacgccactgtaagaaagcagcctcctgagcacaaggctggcactgagggaaacacagcaggacatggacagacggagtcaggatagtatcgcctgagccctggatgcagctatgcctgaagtcagacctacccttggtcttttctgttttctattctttttttaaaagtaagtttaattaacaatgtcataaaaacaataaagtagattttcagtcactggcaagcgaaatcataagaaaatgaacccataaacccacagtgtgaaaacaaagctgcaattgtcactggaagatgtgataatacccaccattctctgtgacttggggttggtgggggttggaaagccatattgtcctctccacaaagagaaaaaggcaggagggtggtgtcaccaacagggtctgggtcaagcagaacaacaccaactttctggggacacctcagccaactccaggaaggggctgatcctgcactcagtgacttgcctccagtcacacaggcctgcccaaggctctgccatctaagctcaggaagcctggcttgctcctgtacccacagtgctgaagtcccctgcggccatacctagggtgacagcagaatgcaaatgaagaggtgctaaggatacccaccaccactttaaaaaaaaaaaaaaaggaaaagaaaacaagaagcgaaaaacatctggaagtccaagagaacccagaagtgaagagctccccagcattgcaaaaaaaaacccacaaacaccctgcatgcatgcaaatcatatgcagacttcatgcaaatgtatttccaattttaacaatttcagcctctgctgcatgtctaggaaaactgtagtcccaccaattaggaattagcaggagaaaggaaataatgctcgtgggttttaaaaactcctttcttctactcagagaggaaaggggggtaaagtgggaagagggttcctatcaggaagttcctgttctggctttgatgaggatgtgctgtgtgaccttggacaagttgcctcccctttctgtgcctatgcctcttgggtatgcaaggtagtgatgagaccaagctaaatgttatcgccagcctctgtcagcaaagcagaagctctggccaccctggacttgcgtttccaccttacagtaacagttggctgggctgagcagtggctgttccttagaagggatgtgtgtcctctagtctgccacagttcccacccaactcgctaagttacaaccaccctactcactcgtttcctgcacgtgccctgcaggtatctgtgtttgtgaccctagggtggtaggtctctactgaccctccaggctctgacattcaggagctctatatccagcctttcaaagaggccctagcacggctcaccgtgaagttctacacctcttgctcccacttccaggctctgcacaggcatttctctagagaaaagggtaaaatggtgagagatggtggtgattgatggtgatggtaatggtggtggtagtggtgatgatagctataaatttcaacttagtggaagcaaaaataaataaaaataaaataaataaaggaaaaagagcaactaagccaaagaaactaaaacaatccaaaataaaacacggaaagacgcaaaagcatcaaaaaaagaggataaacagaaatcaaaaagaaggacggcagaaccaagttcaaatatattaataaacacaataaatataagtggacgaaacgctcctgttagaagatattatcagatcagattttaaattgaactctatggagttaacaaaaaaagcacctaaagtctaaggattcagataggtcaaccacaaaaggagaaataagatatttcaggaaaacactagtcaaaagaaacttaatgtagttatattaatattggaaaaaacagacgttgaaacaataaaaataactaatattaagcacatctcagcattttacagatatttttcatttcatctttataataaccaataactagggcactatttcacaggagaaaactgaggcacacagagtttaagtcagatttcaaagaggcaatgctaataaggtcaggagctaggattaataagcataaaaaccattacaatatttgagtcaccaacatttaacaagcatgaccatttactcagtagtatgcaaaatgctttcatgagttttttcatgcattgtctcatctgatcttcacagcaagcctgggaggtaactaccatgcccattttacagatgggaaaatggagacaaagagaggttcagcaacttgcccttggtcacacagctaagaagtggagttggacttccgaattcactcttaaccacacacagtacaagagaaagtagaatccaggttggaccccacaaaaggtgatctaggaaggctccttcgaagatggggcagctgagcatggctttgaaaggaagaggtgatggcaggaccccccccccaactccccaacaaggggtgtcccgaggttagtgctcaccacacaggaaagagcctaagcacaggctgacacaggttgagtctctggggcagctgtgggcgaggtgttggtgctcggcccgagagacaggatgaaggggtgggcactgtggttgggggaggatggggtcagggtagagggggctgcagtgaagagatctctgacttcctgtgctttctcagcaagacggtgacaatgcccgatccccagcagatgaggagctcactgcataacatcagtcagacaaaaactccaaagagataacccaaagtatccagaataatagaaggactctgggaaatcaaaaggacaattgtccaatagaaaatgggcaaaggatgtgaaaaggcaactctcatgaaatgcacccacctccactgccaccaccaggtcaagacatctcctacccgaaccactgaagccaagcactttctggtctccctgactccatcctgaccaccccacggtccatcctccacacacagccagagggaccccattagaactaaggcagatcccattcctccctgctcagaaccttcccatggctcccacctcaccaagatggaaaataaagaccccacgatggcccacaaggccatacctgacctggctccattacctctctaaccttactccctcgctctctccctatcctcttcctttccagtcaccctggcctcctcactgttccccagacacaccagcaacagtcctgccccagggcctttgcactggctgttccctctggaacaattttccccaaggtacctgcttgacttcctccttcacctctttcaggtctttgctcaaatgtttccttctcagtccagccttccctgaccacattatctaaacctgcaaccccctgagtgactcctggtccttactgatcttctgaacctgatatttattttttccacagcatccaaatattccatctaaacaagcatacacatttcttactcatttgtcaccatctcccccaagaagaatgtccgttccaaggggacaggggttcaagctggttttgttcactttgtacctctagcacctcaagcagtgcctgacacataacagttgctcaataaataggtggtgaatgaatgaatggcttcaaaaaccctaaacactgcagcaccaaccgtggctgtctctcagaggacactaggaagacggaaagggatttgctaagagagtagtattctactgtgtgagtcactgttttttaatgttggcttctccccttccccctccacccatcctacataaagtctgctctggtgccacctaaaatcttctggaaagctatgagtagtatacgtccatgctccgggaaacacgtcactcccagttgtcccccttcaccgagaattgaggtcaacacctccctggcaatggacctcactcagtccatcccaggagcgcggacctcagtatcagccactttcctcccagccaagtagacagaggtaacagccgaatgacaaggtccttgcgctgcacttgggtgacagctgcatcacccacagacagacatgggaggtgcaggagacaccagcggccgtgcacagacccaaggctgtaccccaagcagccactctgcaaaaaacctccctggatgcaaccccactagagcagctgttccgaatggacaggtcccaggatgtgtcctgttggggcccacagtgtttaacaagttctgaatcaagctgatacttggacataagtaactttcacataaaagtcccaatttctggattcagaaacagttggcaagaagacaggggtggcctttccacattcattcaataagtgaccaggggtatctaccctgtgcaggcaccattccaggcactgaggaaacaggcccatatccctgcccttggggagctgatgtctcaaaatcaatcaggacaccaagcgtcccaggacagaatgtgagccagcgagcagtgctatgaagaaaaataaaagcaaggtgaaggggacagagaatggcagaggcagctcctctatcgcagaggtggccagggaaggccttgggcaggaggcactggagcagcagaagcctgacaaagatgaagagtgagcctcaggagacatggggtaaaatgtcccagcagaagaaagagcaggtgcaaaggccctgaggcagaaacctgcttgttgtgttcagaacttcaggaagcaagcctggctgagcagagaagatgacaaggtcagagaggaacatgggtgagatcggtaggacactgcagatggcaacagcaaagaacttggaccttactcggagtgagcagagagtcctgggagggtagtccggggaggagtgacatgaactgacttcagtttagctgctgagctgggagcagcctgcagaggacaagaacagaggcagggaggcccgctggggccgtggcagtgtcccagcatgggggaagtgaaggcattcggaaacagctggactctggacagagtctgagagcagagccgacaggacctcctcatggcgagacatgggggtggggaaagagggacaccaaatgtaatcccaaggtttggcctgagcaaccagaaggacagaggggctgtctgctgagctggggatggagggggtggtggggaggtggtctggggaaaggcatgagtatgcttggtaagagatgcctgccagacactcaaatgcagaaactcaacgggccggaagacaagcccagggtctaggggagaggtccgggctgaagtcatccaggtggaaacggagtttaaggccatgggaatgtccacacaaatcctgtacatggaccttcagagcaacatgactcacaatagccagaaagtggaaacgacccaaatgtccatcagctaatgagtgcataaacacaacgtggtccagccacacaacggaagatgattcagccacaaaaaggaaggaggcaccgacacgctccaatgtggctgaaccttgaggacatgagcctaagtgaagccagccaggcacgaaagaccagcactgtgtgattccacttggaggaaatatccagaataggtgaactgacagaggcagaaagtagacaagtggtcggcaggggctggaggaggggaggatggacagtaagtgtttataggtctggggtttcttttgggggtgacagaaatgttctaaaattattgtggtaatggttgcacaacccttgagtatgcttttttaaaaaaggccacagagtagataaggccaccacaggagcaagtctagatgggtaaacaaacggccagaggactaagcccagggcccatctctcctcagaggccccggagatgaggaagcagcaaaggagaccaagatcaagcggccagagagctgggggcaaaggtggcaactgccccctgagacagggtatgtcccctgcagtcagccccaggatgtcccctgccacacactccaagctcctgcagggcccagcccaagtctggaagctccaaggggcagggcccgggtctgtcttgttctcagctgtggacagtgagcagcgacacagatgtgtgcatcaccaggaaataactaagaagatcagtgacagtcaggccccccaccggcaccagccagctgtgcaccaggggcattaccccaaacctgaatcattcccctggcaacgtgaatggaaaagtcaacaaagcctgaaatgccaactgcctatcctgggcctcggctgaggagtcgagatagaatgttccagctattcttaggcaacgttcaagttcagcttttgggggctgttcccaaaaaggctttcattctcgcctcttccctcttcctacccaggctcctcaacattgtgtgcccaccccaagtgggagttcagctcaaacaagagggctcagagggccacggggacccctgcaagggcatctgaatctggagaagccagagggggtgggctggggggttgagctcagctgcttcaagttcatgggatcatctttgaaaatccactggaaaatgtgacagaaagaaggaactccggaggtgggggggacagaattcccctgagccccgggtgtttgctgatgcaaatgttcccgctctggggccaaaggccggacacactgaggagttctgtcaggcggggagcaaggcatggccccaacgggagtctaaggccctgcttgttctctcccaaacagcaccccccaccccacaatctcctacttgataaacacagctagagaccaaggaaacaaggcgtgccccgacggagcgcaagtgggcagagtaaacagccgtctggccaggagagcaaaccgcagccaccccatcgcttttcctgcgggccatttcctccacgggtcgccgggcggttctgcccctgctctctctgttctcctgggaatccagagcccaggaatcccaccagaccaaactctggcccctggggagatgggaacaggcctcagaaatgcctgggcctcacatcgagcctagagtccaccgtacacacaggtccagcgacaccatgtgttaaaatatgtcacggaagctgcagctccaagtgcctgctggaacccagactttcgcaagatccagaaaccaaacctcagttcagctctgggccatggctgctggttcttcttatgggtcagatgttcaaggttttgaaacgcagagaagaaggacactggcctcaaaacacagagccaccgaccttagacgccatttagggaactgagaagggcagcatcgctgacactccagcactttggcagtttaactccccaaaatccttctcagcaggcagtagagccatatggttaggggtggtcctctggaatcagaatgcccgggttctaatcatgattctactgcttatctactacgtggccttggaaaggccacttcctttctctgtgcctcagctgccccatctccaagagggggctaatcacagtgcctaccttgctgagttgccgttagaactaagtccatgcttacttgtcataacaaccccgtaagtaccattaacatgaaccctatgtttcaatgagaaactgaggcacagggacggatagtgacttgcccaaggttacacactcgtaaatgacagagaaattcaaatccagactgcttatggctgcaacggctgactctcatccaggggtcagcacatttttgctgtaaagggccagatggtaaatattttaggctctgctggctacatccactctctgctacatattcttctggggttttgcttgttcgtttaacaaagcttttaaaaaaaagagtaaacatcattcttagctcataggctgtataaaaacaggccatgggctatatttggcccagaggccacagttttgcccaccctgtctctaaccactacagtacactgtctcttaatgctggtagctaatccaagttcgaaagacacatcacacagatcacacaaagcacatctgcaggcccgatttggtccacaggctaccagtttataagtttcacctgaagcttcttccacaaccaggtgaagacctgagctacagcatttctaagacctatctagggatcgaagccatggcaacaacaagtgctgaagttcctttcgagattgctgggagagatcaacagcaggagcagaccagaggaggcatgggagagctgcgtcccacccccacggctgcgcacagcaaagtcctgtgttcgtgggcagagctgatggccccagggtctggcccagttcagaggctccagcatcacccaccttctccagcagaaaaccaagatgaagaatgccctggtacccttcccctccccttttgcttccagttcatggagcaaaaatacacaaacccctgtgagcaggtgcgtgaatgaggccccaccagccaaattaatccccccacagggaacctaaaacacagctgccttcaggacagagccaggacaggctccggccaatagccattttgttcagccatttccaagggctgaaaccctgggctgagagcagtggaaggcggaagagccgtcccctgggctcaggatctgtccagcagccaggctgaagcctagaatcaagacttctccatccccacagaagcagcaaaccttccctgctttgcccagccaagacaaagccagggctggcggcagggaaggaaacagcaggtgtatggaaggctgcatttgcccagccaacacctatgcctgccctcaccctgccttccacaaacagctcagactttggtcacgtggggttcatctgtcctcactcatggcctgtgggacctagtgattggttcaaggttggagcacatgacccaagtctgagccaattagaattcccttgctcaaaatgattggttcaggagtgcagcacctgacccaggtctcagccaatcagaacacaacactgccctgctcactgtcattggatcagagtggagtgagaccatgtctcagctaatcagagcacagcaatagtgattggttcaggggtaaagcacgggtctaagctgactggaggatgataaatggtacatgcaaaggcttcatgtaatttgtccaggtcaaagcgcatgactcaggcccaaaccatttggcatatgaccttcccctggctgcagatagccaaagacagaatgaatctcaggactttcctcagctcttagtagagaggttcactctttcccactgaccttaaacttgagaggatgtgaggccaggagaaccacagccacctgctgccacactgaaaataagcctgaatggtggaaagcagggtgaacgagagagaaagaggcagggtcctggtttaaatccagcccggcccaaagctgacactgctgctagacttctcagatacttgaactaacaaattttatgttatgctgaagccaaagagttttctgtcacttcaaatacgggaaagtctcaccttaaggaggagcgggtacttgcagatcctctggatcggagacaacaggtagccttccaaagggatgtccgtggtcttccggcctcccagaagcatgcagctctgcaaagggacaggagaccttcatgaaacccaccaaggatagcacagggacatagccaccctcaaccatgagaaacgctctcagagcacagctacaatcacttggcaagcgatttagcgacccgtagaagtgaaaacgtgcatcatctacaaccaacacaaaccctactgggccaaatcttgcctactccccattttggtaagttttattagaaacacagccacatccatcacattggctgtggccccctacaagctacaacggcagagctgagttgttggggaaaaaaaggccatatagtggcaaaacttaaaatattgactatctggccttttacagaaaaattcacccattcctggtctagagaagctttcacatatacacaccaggagactcaaaaatgccttgcttacaacagtaaaaaatgggacgcgacctaaatatccatcacctgagaatggaaacatctgtatttttgtttcagtctgtttgcagcagatttatacaatggtagctagctatgcagcagttaaaatgagataaccagggccacacgtagcaacacgggcgaaccccaaaaatgtactcttgtgcaaaagaaagaaggatatgtacagtatgaagccacttacagagatcttttaaagacatggcacataaaactatgcgctgtttatggagagcatgtatgaggtcaaatataaagacatgcgtgttaaaggaatgcacccaattccagtgggggttccctctgtggagggagagttttgggttggaaagtgaaccaagaaccttcaactgttactgaaaatgtcctagttctttagctgggaggagtgtacgtgattctgtcatatgcatacctctattttggcttgcagagttaaaaagtacagctctcttaggaatggaataccgttaccctaactcccacgctcagccctaagctcctgtccacatgaatcaacccagtgttctccatgtcaatacttccgccctgcagcccccttgcctctctcggctcattccatgcctcttctctggaatgtattctcttccccaataaaaataataataataataatactgctatcatccatcgtaaacactgaccaagagctaatcatgtgtccagcaggcctctagggctcccaaccaccaaccaccctatcaactgaaaactatgattattctcatctcacagcttagatccctggggtgtgagaggtttagtcttttactccaagaccatcccagaaaagtgagtcacagagctgggacctagagccaggcgggttgacaccgagtctgggattgaaaccatgatgcccatgtgcccttaccccaagcccacccatgcaccaaggccatccctgccacccaacctgctctcaattcccaggacttcttcctcctagagccttcataggtggccatttgttccacgtggctctcaatcacattacaggcactaccctctccttcagagaggctccaacttaagaatccatttttgtttggcaggaaccatgagttctgctgtgtttccctgccatgcccttcacagtcctgggtccctcaggctcactatgtgcccattatgtgtaagtgaatgaactaaccaactaactaatgaaggaaccacccaccagcacatccagccattcctcctcaacaccaccctggcaaactggaaatgaatccagactcttgggaaaagggattcccatcctatcatttattcattcattcaacaaatacacattgtgtgctgtgtgctgtgtgctgtgcacagttccaagcactggggggctgcccaacaaaacaaattccctgcttatattcaagtgaaaataagaccataagaacacataccatgtgcccaccatatgccacacgctgtgccttgtgcttcacatacacagaaagttcatgccgaaagcctaaggaaataagcatggaccactgtcccctaccacacatggggaaatcgtggcacgaagagctggcccaagtctcagagctacttccactgcctcttagggatcacaataagctctgcctggaaaagcagaattctggggaccccaggtcccagctctagctgagctgaatggcccccaccagtgtttacccctggcacagatgggggattgaggctgcggcagctgggagatgccgggccccacgctgctcacactcaggcctttgtcctaggagccagcacttgccacaggctgccctggtgatgtcagctctgggcagagtgcagggcgcctgggggtggggaagtgctttctagaagcccccagggcttggcgtgagaagggcccatctttgtccaggatcaaggagttttcacaagattttcacagccaccaaggacacttccccacaaacactctagattgtggtttcactttattttcttttaaaaaaaaacaaaaacaaaaaaaacaggcaaacacacacagagctagcattcactattctcactacatttcaggcactatgggaagaacttctgagaagtccttaaatgctcaaaattcacagaagtgagttagatgaggcgtcaacctcatggtcttcccaacctcctaatggcagcacgttcctggactatcctgagtcctccctttctgcccatgctgcccccctggctgatcccaccctgactcggcttttttttcttttttttcctggacagaatctcattctgtcgcccaggctggagtgcagtgtgcaatctcggctcactgcaacctctgcctcctaggttcaagtgattctcctgcctcagtctcctgagtagctgggattacaggtgcacaccaccatgcccagctaatttttgtatttttagtagagacagggttttgccatgtcatctaggctggtcttgaactcctgacctcaggtgatctgcctgcctcggcctcctaaagtgctaggattacaggtgtgagccaccgtgcctggccctgacttggctttaaacaccatctttctttatattgaaaacactcaggtttatctctctagcccctaaactcccgactagagtctctgctgcccccccaatgccccacctggatgtactgcaggtatcttaagcctcacacatccaaaagggaatgtttatttccctctcctaccctagcctgcaccctcttgggaaaatgcaactccattcttccagttgcttgggcccaaaaccctaaagtcatatttgactcctctcgttcatttatatccaaagtcaatgatcaggcaaattgtgtcagctcaggccctcatgctctatgtgaatccaaccacctctcccaccacaaccacgctgttcgcagacaccatcgcttcctgcccggacattgcagtagccctgcagtcggttgaatggtgttccccaaaatgccaggcccccacaaaacctcaaaatgcaaccttatttggaaattggatctttacagatgtatggtaattagttaaaataaggtgatgctggattagaggggggaccctaaatccaatgactcatgtccttatgaggggagaagacaccaaagaaggccatgtgaagacagaggcagagattggagcaatgctgccacaagccagggagcaccgacggccgctggaagattaaagaggaaagacaggatccttccctggagccccaggagggagcacccaccgacaccctgatttcagacttctggcctccacaactgaaagagaatcaattttgttgttttaagcaaccccatctgtggcaattgtcccggtcccctaggaaatgcaaacaagaccctccctggacctgcacttctacccagatactaaaggggggcctttcaccatgcaaattagcttcattcatgcctctgctcaaaaccctcccacggcttcccatcccactcagaataaaacggaacattctctaaggcaaagccacgagctccaacgtgaagggatcccacagagcgatcctacagacatcatgctgcgcaaaagccaccacacacacacacacacacacacacacacacacacgcacatcctgaatgatgccgttcatagacgatgctagaataggaaaaactaagctttggtaagagaagtcagcagagggattctggaggtctgggggccatgactgggaatgggcaagagggaaccttctggagtgatgggaatgttcttcgatcttggtggttccatgctatagacatatgtaagcatttgtcatcctgggggtggacttactgcatggatgctacactttaattaaaaagcttttttaaaatctcatacttggactgggcagagtgactcacacctgtactcccagcactttgggaggccaaagagggaggattgctttagcccaggagttcaacaccagcctgggtaacatagcaagaccccatctccacaaaaaaaaaattaaaaattagctgggcatggtggtgcacactatagtcccagcttctcagaagactaaatgggaggatggcttgagtctaggatgtcgaggctgcagtgggccatgatcaagccattacattccagcctgggtgacgcagcgagaccctatctcaaaaagcaaaaacaaaacaaaacaaaaaatttcagactctttccattgactaaatgctccttcattacctggtttctttcaatctctctgacctcatctcctcctgcttttcctcttatggccttcactctagtcacccttggctttcttgcaattcctcaaacacactcctacctcagggcctttgcacacgcaggtcatctatctctctgaaatgctacatagcccctgcctctctctctctccttcacttcctccacatccctggttacatgtcacccaagatgcagttttcccaaagaccaatctaaaacagcatccaccatcctaacttcctcaaaacatcctgtcacccttattttacatcctccagagaatttaacatcacattatcattgaagttcccccgactagaatggccactctatgagaataaggacttttcttgccttgttcatgtcggatctttagcccgtagaatgatccctaccgcattataggtgcttagtaagaagttgctggatgagtaaatgaataaatcatccccattttacagacaagaaaactgaggcagagaaaaattaagacactactccatcattctccatcactcagctggtgcccagcacaacatggatggaaagccagattctgtctgttcccaaagccttaatgtcccataacagactcatgacagctcttctgcacgtggccaaaagctgggagacgccagcaaggagggagacagatggcacatgtgctggcaccccacgcatcctcccctgcccagaccggcccacccagctgctgctaggaatagggcagtttgacccaccaggaagactgcttgagataggaaggaaagaaagaaagaagtcagtccttcccttcccttcccacaccctgcacacaccttcctggcatcttcctccttcccaggacctagctgaacctgagggaatactgtcagagggtgggaccctcagccagggagcccagagcctgggcagcagggactgtcacagggtggtgctgcctgcaagccaacaggtcaatgcagacatggccatttctgtccatgtggggtcttgcagtaacgtgacttcatctttgcattctgcccagactattttatgaatataagtgcaaacatggaaatgtgaagatgtaggtaccggctatgaaaagcaacagtcctgaaagcttaattcacttgagacaaagatggaaatcagtaaatcagtctgccaatttgcccttcctcagatgttcactggagccgggccaagcaacatgaactcacttgtgaaggaaacacacatttggaatcgaaattctggaactactttgttggagactgagtgaaggagaagtgcaattaggaatattattttatagtttagcactctgggaacgtggttcatactccgtatgctatgttagttaattgttctacttttatatactgaattcggtatgtgctgttgggaaaacaaacagtatgggggtggagagacgtctgtgaccgaatgagaagggattcagaggtgaaagactgggactgaaacccaggataagctcaaccacttttctaggatggacccctagaaagtcacttaatattgtgaagtcatcaaaatcacctgtgacaaaggctatgcagtgtcccctaatgtattcttcttccacagtgatcacatttctagctgggcacatggctgctcagaataaagcctgtatttcccagccttccttggatctaggggtgaccatgtggctgagtgctggccgatgggacgtgaggggaggagatgtgtgcagcttcctgttacgccctgaaaaggagaagggtatgctctccttcccgccctccctccaccccaccacctggaagtaggatgtagtcaaaggtcatctgagaccaggtcaatgagcatcataacctagggccttagcccctgacactggagccactataccagccccagactgtctgcacccacactgttaacaagagggagaaataagagcccaccttgttcaaaccactgtcctttgagatgtctgcaaagcagacaaatgtttatcttgactcatacacaacagatagtggtttgaaaggctcaaaggaggtcacaaatgacaatccgttttatacataagtgaggctctctacaagtgtagggaagaccatcatggatgtctacagtttttcctgaccaaatgcaaatgcaaatatacccagaaatgcaaacacaaatatccccagaaatgcaaaccaactgctttagggatccactctacccttaggctctattgtatgggtagacctgaccccaccttccatctccagaagtgaccaatcagaacaccaccaccaattactctgtctacagcaattggttcagggataaggttttgagccaacgagcatcagacctaggatttttgctgttactatggggaaagggaagttctctctatcctgaagctgctcagctatcagaggtataagtctggagctgctggaggccaccctgttaccacttcgggagagcctgcctgggaataaagccacagcagagaaaaggagagtcaagagacatacattactgatgacatcatttgaacacccagactctgccatctctgtagccctctcaggtcttaaactccccagaaaagtaaatccctctgttgttgttgttgctgttgttgttgttgttgttttgcttctgccagtttttgggtttttttgttttttgttttttttgaggccgagtctcattctgtctcccaggttggagtacagtggtaccatctcagctcactgcaatctctgcctctcaggttcaagcaattctcctgcttcagcctcccaaacagctgggactagaggcacatgccgccacgcccagttaatttttttgtatttttagtagagacagggtttcaccatgttggccaggctagtcttgaactcctggtctcaagtgatccacccgcctcggcctcccaagtgctgggattacaggcgtgagtccccgcacctggccgcttaagccagttttaattggattttctttcatttataattaaataatcctaaaaatactagtaatcctaataaccatcataatgacagtagtattaataattactactcttgctgccatttttaatagaacccttactttagaccaggaatgggcaaagtcaaccctaatctggccctctgcctgtttttgtaaataaagttttattgccacacagccacacccactcctctacacattctctagggctgctttcatgctacaatggcatgagctgagtcgtggtgacagaaactgtatggtacgcagagccaaaaatattccccagctggccctttatggaaaaggcttggcgatccctgctttaggcaggagattaccccagccaaggaaaggatttggcaccatggggcagcatgaagtcctcttgtgcccagattccacaaggatgaggccgagtgcaagggagcaccagggctgacgggtcaacttaccaaaaggaaggcgcgcacggtagggatcttgttcagctccaccagcagcctcagggctttctcatggttgctgcaatactcctcgtacacgcagaacttgtccttctgcaagacaaggacagagcctgtgggaggcaggtcatggtagcaggcaggtgccctgacacatgctgaccactgggctggtagggtaggggtaaggactaccctgacccaggagaagctacagcaggaggtatctcaggtaaagcggctccactcactaccagcttcccagcctccactcttgccccaggtctgcactcaggggcctgaataactttttgggaagcagtgtggcctgggggtcaagagcatagactcaagaagagcagcctgggcttgcaccacggctctgtatttcctgtgaacctgggcaggttacctgacttccctgtgcctcggtctccttatctgtaaggtagagttaataaaagtccctaagtcagagttgttatagctgggggctagctctgttgacctccagatgcccctgagcccaaagatgtactccttccagactaaaggtcacctgtgggtcactaggtccagaaccatcagtcagggtttcccgtactggaagagacaggagccttcttagcaggaagctctcaactgagcattcttggttccagatggttcacagaacccgccaaaccctaaacaaggatggcgtgggtgaggtcactggaggaggaagggttgcaaggcctcaatcctgagctagggatgggggtgtgcaagagacccgaacaagctaaggaaggaagaggtgggtccacaaagcaagcagctcatcttgtttctaaacaagcccccagatggccttccgatgggaggctgcaggaaataggaaaccaaagagaagggaggatgggtttagaattaacaggcatccccagcccaccccagctcactctgggggctctgtgtgcatcatctgagcagacaccctgagccacaaagtgcccaggtcagtgctgatggctaacacagagtacatacccagcacatagtacaggctgcccagcatgtagtacaggctgcccagcatgtagtacaggctgcacgctgctctcctggaatgggggtgaactcactcattccccacgacagccttacatggtaactactgtaacagactcacatacccatgacaaaaccaaggaaaagttgcttccccagggtctcgccgctagtgcagtggcagaaccaggactcaaacccccttaaccccagtgacagtgtcagctcaaggtcatggcatagggtagggatgggagtgggaggcaaatacccagggtacaaatttcaagccacaaatctagactaagctgcatcccaagggcactacaccagaatactgaagggcacagagtgactccagaaacccagttccacattccctaagtagagggtgaccttgggcaagtgcttctcctccctaggccttggtttcctcacctgcaaaatggacatcataactgaccttcaacacttaggatgctggaggatgaaataacttaatatatgtgaaatgagtagaacggtgtctggcacacaatacttcacaatacttcaataccacacaatacttcaaagtactctacaagtattaacaacaaacataaacacaatcgacaaacatggatcaatgggggaaaatatcagacaaaccatgttacaattacccacagtgcacccccatacacacacacataccacaagacacacaatcttgatgcatattccaagaaaccacacaatgatctcaagcattacagcatgcaaactacatgctccaaacaccaccaccaatgtcagcatgcacatggacacatgcactgagtcacaaaccaccactcactcatcaagtatctgcagtccactgagatgccaacacatggcaaggaaggagaagaggggaccccagcacccccaacactgcccaggcagacctttttctattcccacttgtctcaaatgggcctaagggaccatcaaggccaaaagagctgggtgagtagatgtctgagctgcaggggatcactcagccgtaggtaaaaccttgtgagtgggggctgctggacacacctggaaccaggatttcagctgcagactgtggtgatgcaggctgcagggaagaggaagaggaagaaagagtacaactattttgttgtaggtgacaggaactggcctgtctggaaacctgctcctgcagagaagacttgcagtgacataaaaagccaccatgaccactctcaccaaccactatcagcatcaaccctgtaagtgccaaggagaagttctgcagccagaccatctaggttcatagcccaagtctcccggtcaccagctcttggtcaagacaagtaacatttcttggcctctgcattctcatccataaagtacagacaacaatatcattaccataatggtgttgtgaggattggcaggtgaatttatattaagggacttccaatggtgcatagtaagtgttcactaaatattaactagtattattattgcttaataatgttgttgctattatcaccagcatgattatttcagaaacttcattaccttttttattgaacagggtagggcagtaggtgggaaggttttgacagcaaaaaaaaaaaaaaaaaaaaaaaaaaaaagacaggcagagtcaggaggaaggcagcagatagactcgtgggtttagggaaagcatcgggagggtcccaggcagattttgggaattatgatggtccctgaccccaggatgttttacgtctcattcatgcactgtccttctcccctgaatctcctgggactgtcagctccatcgggacggcgttttcatctgttgaggtcactgctgtgatgtcaatggggtcagcggccactggcagagagcaggtattgtgactatttgatgaatgaaaggaagaaaagagaaggaggaacggagaggctaaagggccctcagaccagctctgtgcttcttcccaggctggtcccaccccaccccagggaccataagtgagcacatgacccagacaaaaccaatcagagttccccgtcctaataacagtggccatgtgacccaagctgggccgcaagagcccgcaaggactcgagctggaatcactgggaagagaaactctctttgagctgctgttgaacccctgccaccatgtgaggcatgcaccccataagcccctcccattctccaagagtgaaatcagcactgcacagataaaagcagagcctgagatcagagaaagacctggtcctgaaatcatcatacggagtcctggatctagctatgcctgaagccaacctacactcctgaacaatttcactgacatgcatcagtaaagtcctgtatttgtttaagcctatctgaactggtgtttctgtcacgtacagcaaagacagttttgatacatgcacactcttaaaggcagaaaatgaaagacatggacccaaatcttagtgaggtgacagggtctctctgtccatctccacagagatgaagggaagggactgggccagaaagcagggacaaatcggtttcttcccacataccaaccccagtcactgggtagtgccagctggaacactggtgaggaggattctggggccccacaggaagcctagagacagaatgctgtgattgattaggaatgtctgccacaggtgcaggagagggggtaacaagctcaccactggtttgtcattcctcatcccctgagcccccttctacgacaaggtctgcaatgttttcctctccttcagcctgtgggaagggcaggggcccaacgcttgaggcttggagaagttaaatttagcaaaggacaacatcccctctgcagcaccgtgcccagttcaatcacgcctgtgtcctttcatccagcctgaccccagctgcatctcaggcctgagaccctgcaaatacggaaacgctgctcttgacagctcagagtccaagtgttccatttcctcctggaggcccgacatggggctctgattgctttgccaggaagaaacggacaaacagttgtgcatacacagatgtggtgggtacggaacatgtggctgtgggtttggggggagaaggggacagctgctggctggaaacagccaggggaggggagctcacccccaggaaaggctcaaggattgtgagaggtggcagctgctgtccacaatacccaggtgacagtggctccacagagaccatcagctccaaaccactcatttcacagccagcaagactaagacccagaagagggaaggagctggcccatgcagacatattctccagtggggaggagagaagtgagaatcaggtctcagtttctcaacagtctccccaaattatttacccatccatacagctgtggggagaggggggttaaaacagaaatcagaccacactactcccgtgcttaaaacctgcaatggctttcactgactcagaataagatctacagtcctcacctcggcacgcaaagccctacaggatctgccctgcccccactatgacaccctcaaactctctctatcactcactctgctctggccacgccagtctcccttcttctctcaaatgagctaagcttgctcccagctcagggcttctgccctttctcaccttggtccagaccaccctccccaagatcatcccattccaacccctcagaaaggccatcccacccttgggttgccagatataaaataaaccccaggatgcccaggtgaatgctcatttcagacacatattttttttagtataagtatgtctcaaatattccataagacatgtttccactaaaaaattatttgatgtttacctgaaattccaatttccctgggtgtcctttgttttcatttgctaaatctagcagccctggccctgacctcccgattgaaagcaacctcaggcagagtcactctttaccacatctgcattttatgttcttcacagtctgcactggcatctgaaatgacctcatttgttaaattaccctctgtttctcccacctacgagccgcgtggcagcacggagcaagtctgtcttacttagtacagcatccccagggtctagtgcagagcctggcacacaggagatgcttactatgtatttcaggagacctcatcacataagagtaaaaaacacagactctacagcctgactgtgtcagctcaaatcctggctctgatgcttcctagctctgtaagcttgccctataacttaatctctctgggccttggtttcctcatctgtaaaatgggtacaataatagtaaccacctttaaagagtgttgtgaagttttaatgaatgcatatctgtaaggcacagagaacagaacccagcacaaagaaaatgtccactcggtgctagtttatgataaactcagtagttagtggttgggttttggggaaagggggtgagggactcttcccccatctgatcagttaggtgacactagcgggctggactgtgggccagggccccttcctctcctggagagcctgtctgcaagagctctgttcccgattagcatctcaccagcccagatgctgccatggccatgggaaaatgtttccaagcagggagtaaatggagtaaacaagcctgggaaggagagtggacccagcacctctttcctttggggctgcagtggatgccatggtgcactcctcaaatgcctgtcacagagacagagacaccccttaccccaggtgctgggagtgctggctgacaatgaccctcagctaaggccctctcctagagctgccttcagcctaagagggccacctgtctgaggcggtacacccactcctgaggacagcccactgggcaacaagggtgcaaaggccttgcccacttgctgcaattgtgcataatctgaagagctatcctagttccagagttccttccagatgggactatcagtggctggggtggagcctctgcaacctctcctttagctgcttccaagggcccacctgtgtgcaaatcgccagcttccagaaacccaacctacagaggtgtggcctttaaaactcctgagacagactgactcaacctatcctccgtgagcaggcaggaagaggcgtgataattttaatttttaattaaaaagatgattttaaattaaaaaacactgtatcacacactgagaacgctggctcctttttcaataggtccagttagctcaaggagggtcttagctggtgtgatgtaagcagcctcaggctgaaaggctcaagtagttaagagtttctagatagaatgcggtaataccgtttggtttctactgcatttattttgacaattaccttctatttatagcactcattttctattttcaatgatgatgcaaatttctctttttaaataagttcactgaagttttgttaagtgaatcaattttttttttttttgagacggagtctcacactgttgcaggggctggtgtgcagtggcacaatctcgactcactgcaacctctgcctcccgggttcaaacgataagtgaatcaattttttaaagcattaaacaaataataatacaaagaatactcagatatagcaaaaattacaaacttagcgtgtgagctgaactgaagaacactggcttagcccttaggatggcctaaagcccacttctgcggctggcacagtcgtgaccttgagcttaacctttctctcagtttgcttgcatgtccagagggcaagtgagcttggggctcgattttttttttattttattttttgttttgttttgtttgttttcagacaatgtctcaccctgtcacccaggctggagtgcagcggcatgatctcaactcactgcagcctcaacctcttgggctcaagcaatcctcccacctcagcctctcaagtacctagaactacaggtgcacattaccatgcccggctaaggggctgaactatttctgatgcagagacagagcagtgaacatgacagagtccctgtcctcatgttgtttatattctagggagagacagacaataagcaaaaaggggcaaaagatccgatgtgtcaaagggtgatgcggactgttctgttgagaatgacagagtaggggaggggcgcggaagggcaggagtgcagcaacttaaacaggagggcatggaggcctttgcggagaagatggcatttccaaaaagctttcaaggcaagaagggagagagccgcagggatgtctgagggaactggtccagcagaggaagcggcctggggtgagaatgggcttgccatgttctggaacagcgaggagatccgtgtggctagagccaggggagcaagttccgaggaatgaacagggcctggcgggctgtggggattttattccaatgaggcaggaacctttggagggtgctgggagaggggttgaagagatctgattgatgtttccagcaggtctctctgttggctcaggggagaaccaatctccaaaatacttcatctctgtcaaagcctccgacattcatccttgtgcccgggcatcacagcagctttgtgaggctggaaggacgggagccctgctgaggtgcaggggggctcatgatagatcgcctggaatggggctcagtgatcccaggtctgggcaccctgcacaaagtcacactccagagaagcctgggaggtgccagaaagcgctggatcacgtgaacagatgcgcacattacccaagtgagaaacaattcctgagcacttattatgtgccaggttctaccaacgtcattcattctctcaaccaccctagaaggtgagttttgtgatacccactttacagatgagaaaactgaggcacagagaggtaaggtcattctcccaggatcccagagcaaggaagtagcagagctaggatgcaaagtcgagcagctgggctctaaaatgcttgatctcccaggcccagggaggatgccaggaaggccccagcacagaacaacttcccacaaaggcctaaacatccaccctccacacgtcatgactctgatggtaagtgcagccttcaccaggtgcctagtttgatgaggctacatgaggagggtcccaggtagcagaagagaggacacggaaaagaggttgcttcatgcacactgaactccccgtccccagccccccagccctccgctgcatctctgagcaagtcaggaatcctgcagaaagagagaggtgagaatagccccgctgtgtcctcagggtccagggctcctcactgacaagcgagttaaacccacttccccacagcctctggggctcagacagagaagccaaaggaatgaggggggccagggcttttggcaaactggacagtgcaccttgaggaccctttctcccacttttgctaagtataggcaatcctaagcaagctcggatcatgacatcacagccaaccccaagcccaccccctccaggaagcaggccggagtaacactcacagctgacacgcggcattagcttggtgctgagccaggtcattcatcctcatgacagccccctgcagcaggaattgtcgttacccccactttacagagttggagactgaggccctgagaggtgaaaggacttgcccaaggtcactgggctggcgagcagtagaacagggatttgaacgttggctgttggctccagagaaaaagcacttcctgtctcctctgaacccaaaggaaagactgtccctcccatccttttcattttcctattcaaacacctttactgcacactgtggccacttgccccttctcaccatctccactgctaccatgctggtccgaggcaccgtcatctcacttggtggggtaacctcttagatgtctcccggcttccagttctccctccacagctactccccctcacagcagccaaagggcctgtggaccacttccctcctctgctcaatgccctccgctagcacccagcccacctgcgccccattgtgctcttatttgtccaattccaaagatggaggagcgtccgctatgtgaataggaagataacgtcgacatttattgagcacttactgtgccaggagctgcactgagcaggctccttgtattatcttgcttaatcctcacaatgtcctggatttatcccgtttatgggtaaaaggacaatgaggcacagacaagatcagtcaacttgctgagaggaccacagttcatgagtggctcagcagcctggccagaagctctccttgccctcactttcacgtagagagtggctggcccttggctgaatgactgcatcttggggtagtctgcacgcctgatcgcacatgagacttgccccccattgccctctgagggcaaagtcacacagctccatcatcttaggctctagccactcagatgtgatcccttggagaagtgagttagtgatgatgatgatgatgatgatgatgatgatgatgatgatgatgagttaacagtggccgagtgctgatacaccaaagtttctccaccttggcaccactgacatttgaggtcagatgattctctgttgtcggggctgtcatgtgcattataggatgtttggtggcatccctggcctctacttactagaaaccagtagcactctagagctaggacaaccaaaaatgtgtctggacattgcccattgtcccctgggggccagaatcaccccagctgagaagctctgctctagactctctacccgattgctttacctctgagtctggccatcaaccttaggaggtatacggaattgtccctactttgcaattacaggaggaaatagaggctcagagaggcaaaggagtttggctcacatctcgtgcccgtgaggctagcttgggttcttctgtctgtgaggggggtcccaggtagtacagaaaaagagggtatggaaaagcagttgccttccttcttccagcctaccacccacaattccaaatgcgttagtaatcttgcaggaagagagaggctattgcaacaagcgtcagcctctctgaccaacagcccaacggggcaccccaggatcagacacccttactgtccagtgggtgcctgagccgggactcaaacccaggtctgtctgatgccaagtccatctcttcttggccactagctacctctgatggtcactgtggcagaggggccccgccaggccaggaggtcgcaggactccaggacacatgcattcagtgagggcccaccctctatgtggagctgagggaaaggagagtcactaaaaatgcccacagcctgctgggcctgacctacttcccatagttccagggatgcagactgggcccacctgcccaccttgctaccccatctcccagacaggcctacagaggaagctggtgaaggcggatggggcagggacccagggagaagcccacttttcaaaaactagagtccaccaggggcagtggcatggtactcacgaattttaagaaaacattcccaagttcatgctgagactgcggctccgggtgtaaacaatactccaaggcggccaagaaatccttatgaacttccaggatgtcttcgatgttcgagaacaggacctgtgaggaaaagagaggccagaggacagcgttaaggctcagagggagagcaaagccaagcactgaaaaaatacaaacctcggtgcgggtgacattgtagtcaaagaagaactctcaaacaccggaactggtttaccactaatagaaatctttgtaataacagaaatattaccaatatttatttactataatcggaattagtgactaatcgtgtgttaagaactttatacgcattcatagaatctaatccccactgtaaatctgtgagatagaaactattgttatgcccaatttacagatgaagaaccaaggctcagataaaataatattcccaaggtcaaagtcttgcaagcagctccacatttagtatgcagacattcatcacagtcagacacaactgctgtgtccagctacaggacgatgttgaaattacaagtatatttccatgcactcattaaaatgacgtggtagaagaaaacacaataaggaaggaggttagaaatacgctgtctaaactctcacaaacaatatatgagataccctgtttccccacatcaatctaaaagtgtaaaacactaatacaatttgacccagcaatcctacattttagaatttaaccttctgatcagttgttcccaacaaggggcaattttacccaccaccccgccacacacacaggatatgcggcaattgtcaagggacatttttggttgtcacaaattgggaggaaaaggggtgtttcgtagacagaggccagggatgctgttaacccttcctgcaatgtacaggacagaccccgcaatgagcaattattattattactttgcctctctgagtcttttatgattgtattttttaaattattattattattttcttttttagagacggaatctcgctctgtcgcccaggctggagtgtgaagtacagtggcacaaacttggctcagtgcaacctccgtctccagggttcaagcaattctcctgcctcagcctcccgagtagctgggaatacagatgcatgccgccatgcctggctaactttttttgtattttagtagagacagggtttcaccgtgttgcccaggctggtttcgaactcctgagctcaggcaatctgcctgcctcagcctcccaaagtgctaggattacaggcgtgagccacctcgcctggccctcatgattgtatgttttttaagaatagttgttaacagccaaaaactggaaataactaaaatatccatccacaggagaatgggtaagtaaactgtgttgcattcctacaatggaacaccacacagcaatgaaaaagagtgaaccacagctacacacaacatcatgggcaaatcccagaggcaggcagggacacgaaagagctcactttaatgtaaatttcaagaacaggcaaaaccaatccatggtactaggaaccagggattacctttagggagggaggactgactgaggggggcccagagtgggcagttggggctgggaaatgctctctgccttcatttggtttcatggtacactggtgcattcgtacgtagacacgcactgcattcagcactaaggtttgcaccctttactgtatgagacttctacctcattaaaaaaaaaggtaattttttataaactgtaataagtcgcagcttaaaattataataaataatttgtaaactataacaaacagtgtaataaataagtggaataaacaggaggtgctcagccatatttgctgaatgaatgagtgaataaatgaatgcaggcatagagtttagatcccagtgcatgaacacacacacacacacacacacacacacacacacacacacacacacacacacacacacacacacacacaccccacccccaggaggagccatgcagagaccttgagcaagtccttgacatctctaagactcagctttcttatgcaaataattcggtgtagagctgtcaacatgcaaggccaccgtccagattaatcagggcgtttggggggaatgtcttctatgaccgagtcctttgtgtgctgtaaatactgggcaccttggacaccaggaccctcagagccccgaggcctgaaaggcagctcagagagtgaggtcacacagaaagccaggcctggagagccaggctggggctgagccatgcacacagaaggcctattgatctcctcctcaaactccccagagccatggccaaggccaaactggacccaattactcatcagccctgcctggacactggatgcccagggcgggagcgggggccgggactgccaggagagggactggaggtgcccggctcccgggggcacttgggagaggattttccactggctccaagccagagggcctgacacgaggagcccggaagactggggggtcacaatgagcacagagggaaagtctcgggttggaaagtggggcccggggctaaaaattcctgctgacatccaccaagcacagcttgctcacaggacaagaggcctccaggggctgaagggagcaagctggggcagggcaaagctggcggccagcagccagcgggtgatgcgcctccccctgcatgcacaccctctgagcatcgcacgggaagagcaaggcacaaagcaacacagatgctctagaacaggggccagccccagcgtccacaccttgacattctcctccgtgaggcccttctccactgagtcggccacgttctgccggatgcgatgcaggaatgcctggaggagagaagcagagagaggtgagtgtccgcgtctccagctctcccatggacggccctacagaaggctctcaagttcaaatgccaactaggatctgggaggtaccacgagtccagggacacaggcagaggacgaggaaaaacgtgctctgcttacaccttaaacacactggagcagccctcactcccacacggtcaccaggggtgtgctgtgcacctacgacgccaggccctgcactgggccctgaagatacagcagagaaaatctcaaagcccctgccttcgaggaacctttggcccaaaaagatacacacctgcttcctcacccaggggcgcctctcagactctaattcatttcccctttcaattttttttttactttgctttacaatttaacctctgagtaataacacagtcacatggctcaaaagtcaaaaataaaaatggcaaaaacagagaaagtctctctccttaccccagccccaaaccatctagtccctccccaacccctacaggaaccccagctactagtttcttgggtattcttccaaaaaatctatgcaaaaacaaacacacacacatacacatctattcctttttttttttaacctctttacacaccaaaaaatagcaacgtatactggatgacccgcacctggattttctacttaatatagctcagagatccttccagatcatctcacaagaagcttccttgcagatgccaggaatgtactgtttgaatggaccatggtccttctaccaccctttcaggggcttggaacagacaaatcacgtctctcctctgtgagacgcagtagatgagtgtgacgacaccagggcaggagtgacaggggctgcgggagccgagggtgcaccattcatgtggggtcacgtggggaggccgcaggcccaggaccaccagaggttcggatttgggtgttgttgtggtttttaatgaagccagaaattagaattttttttcaaaagaaaagtctcccagttttgaagtgttggtgaaaaagccctctgttattgcaaggaactggattttaggggttgtgagtaaaagtggggggaccagggcagtagggtgcaatggtgccaacaagagatgacggtggcctggcaccaggtggtgtgggtagaaaagtggcagaaagaagagctgccgaggggtcacacgtatgggctgagagagtcacagggataaatgttggggaaaggagagacagcagagtcagcacctaagggagaccgaggcccagcacccacagccacctccgcctggtttgccggaactccaggatgtgggatctggctgtaggctaacctggaagcagccacatggagacccctgggaaaaggaattcatggtgctgtcatagccacagggccacggggagctgtggggcctatcagtcacctgccctgccaagatggatgacagattgggggtccacacgggggctgctccaggtgagcacatggtctccctgtcacagagcccaggtgcaggctgattaagacatgggctgcaggggcctgtctcatcccaccacgcttgtctagggagatctctgagtgcaggagagatggcggggacagcccaagatagtgctggggtcaggggaagcggagcaggtaagcagagaggaggctagccctctgcacaaggctgtcagatcctttccatcacccagagacacgacacgtccatgcctgcccccgggagcccggccacctgcccagactcaagcctcttgggagggggcgcaatgacagtccacatggcgagtcacagaggaaggcaagacacaggaagcagcttcgtctctgtccacacagagtgcagagccatctcagccagtcttggggctttaacccatttatgcctagtgttccattactggaatgctaagcttgtgggagttacttatatcctactcttcaaggtcattgccaaggtctgattttttattaaaaaaaaaaattgcaacctccagcataaatgggttaaatcccctttttttatgacccccatgtttatatccccagcctggacttctcccctgaaacccccagactcttatctccagctgcagattcagtgtctccacctggatgtccaaactcagcctgtccaacacttaattaatgacctttcccaaactcacaccgaactcttccccacttaatggcacctctgtctttcaagggctctagccaaaacccactagccgtcctcagcccctctcctctgacactccatttccaatacatcagcaaatgttaccagctttacctgaatactacaaccactggtccccatctccacagccaccacccccccagtccaagccatcatcatctcctgcctggactaacacagccatttccctcctggtccccttcaccctcccaaaagtctgttctctacacacacagccagggagatccctttaaatatgtacaggagatcagtcaatccatgcctttaaaatctccatggcttcccactgcacttaaaatccaaatctttccatggtccccatgatcttgtccttgttaatctctctgatctcatcttccagtacttcatcctcccacacacctcaatataaataatcttcagccacactctcattctagattctatccacctgccaaatacactcctgcctcaggacctttgcatatgctgttcctgcttgcaagatgttctcccccattctgccctgagcagcctcctcatccatccggccttagttcaaatgtcacctccgccaagaggccctcctcttcttaatgcaaactcctatcttcccatcttgcgttaggagctcatttgacagatgaggaaactgaggttaagcaatctatacaagctcctaagggaaaggccaggataagcagggatcatggctgggatgaaaccataacccccaatccaacatcagaggccaggtttggaaactggtgagtctgagtttcaaccatgggtccttcctgctgtgtgacctcaggaaagtgcactagcctctctaagtcttcatttactcttcccagtggaatcataggaatacagcaccttttagaatgtcatgggataaagtgaatggaagctccctgaaggcagggaccctgcctgtcttgttcacagctacgtcttcagggccaaatgtagtgctcagcaaatagcaggtgcttgaaaatcaaaggaaggtttggaatgcgcctggcacagtgcctgacccatgccggagacctcgactcaggctccttggaagtctgtggatcctgtttttgaaacgacaatgagcggaggggacagggactggggttcctagaggatgttttaacagggcctgggatactgacaggaagtcaagctccagcctccccagactagagggagacaaaggcagcctcacccagcacagccagggagggcaggaagctgggagtgccgcactccgctggcctagattggggcttcctgtcctggtttcttcacacgagctctgccaccgctattgtgctgcaacaatgggaggctcgggccacccactgaggaactgcaaacaagccggtgtgaaggccacaatgggcagctcgtgacccggaaagaatgggcagcagaggctctgggaccagccctcctgctgcccaaggcacgactggcttttccaggcagcacggcgtcccctgcactggcaggatggtgaaagggaccctccagggcgactcttcctttgtccaaggcttgacagctttgaaacactcaggtcaaaagcagctctcatctccgaagcctcccttagacacaatactgttctcaggatttccagggctgcctgagaaactcctccagcctcggaagctttgcccatgcctggaccacttgtcctcacatctgcccaagtcctcctcttcattttatgaatgtgatgatgaaatacgtcagggatacagaaaagaatagagagaaacaacaaacacccacaaactcatcactacccagctttggcaaatcttaatactacaccgaatttgcttgaaaccatttgcaaaaagaaattcaacaagtctaggggaggcacagactggaaacgggatgaggaggctcttgggggtgctggaaatgttctatatcttgatctgagcagtggagacacaggtcactgcatatgcaaagccccagcagtatgcactcgagattagttcagtttacccacagtaccatgcaaatatcaaacctccatgtattaagtagaaaaggcagaaaggaatcattacagagagaggtgagccactgggcaccttctctccctgcaaggtacttggagctggtgctcctcattcccacgcatgcctctgcccacttaccaagctgtgtgcatctataagcaagagagaatattgttttgcatgttcacaacatttttataagtagcatgctttcagcaacttgattttctcactcaacatcatgtcttccacatttacccatgttgatatgtacactgggcaacatctgctatccagaccccacccttaccccacaccacatcgagctgccagcacctgcatctcttggcctgaagaccccgctctcatgtgcagggcaggccagaggtgcggaagaagtaagactgcctgggagcagccctcagtgatggccagcaggacctggcatgaaaagacagatgaggaaactgaggcactcgatggacactatctccccgagtgccttgatggattcagctccggtggcccccatggtaacccgcttgatgacacacctttcttggctgccttctcctccctgcctcactcccccactctcctattgatgcttcctggggtgacctcccaagtatgctacttgcccttgaatcagtctcgggtcatgttctttggggaatccacaataagacagacctcaagttgttcatttcattgcttactagtcaaaatcacagcatgaagtaaccactgccatgctgcagacacttgtttcaaacatccttactgtaaacaatggcactcaggtgtaagttctttcagctgtatactctcgtcgactggggtatgggtatacaagttcctctaggtgatgcacatgtttcctcgagcccaggcgttcaagttcctctaaatgtatatccaggtcttctggggcataagagaaggaccagagagactgtttactcagctcccagcctgagtgtttccagggtccccagagctctagactgagcaggaagccacatcataattgattagtgatgtctgccatggatgtggcagggagagggttagaaggatgatgagtttgccatctccaacaagctcccacttaatggagataccaagagtatgagacactggtctgaggtcaaacagcaaactggtgacaaaacacagattagaaccaggtctcccgatgccaggccaggtctcacctgtcgccctaacctgagcccagtggttctcaacttgggggtgattttaccccctagaagacatgtgccaatgtctagagacattttgggttgtcacaactgaggacaggggtgctcctggcatctagtgtgtagaggccagggatgctgcgaaacaccctacagtgcacaggacaaccccacaaagacacagctgaccgcaaacaacagtgacaaggtcaagaaatccttgcctcagaaaaggctctaattaaaacctagaaaaaaatccaacctcttccaccgcccaaatactgtctaatgcgggctcttctcaccccactggctcagctgcaggtacactggtctcctttttgtttcttgaacacaccaggcccccagcatccaggccttcgcacgtgctgttctttgcctacagagcttttcccaagacattcaattggcaggagaggtccctcctctcacaggccacccctggacccatataagagaggatctcacccactacatagccacctgaaccctgttacccttcacagacgtctccgctattggctgtgctcttatcaattaagtatggataggtttgatcattcagtatcatctccctcactaaagtatcagctccctcagggcagaagtcaatttccttggccgtctacgcagcgcctgggacagaggctggcacacagcaggtgctcaagagagactggtatgtggagaaaggatgggagagacagggagaaactgagaacaggctccagaaagtaagctgatatcgagctgggagaggcaactagaataagaacacctttttaactcactaactacacctttaggcctcattatgtgcaggtgctgctctaggtgttttaatcctcaaactcgaggaggcaggcattgttattactatgtccattctacagaagagcctaaggcccagcgcagtaaagaccttatttaaagccacacggctggcaagtgaaggagctgggccttaaacccagacagtctccatcacgcgccatcagtgagtgactgtggacaatgaaccgcatcagcctttaaaacaggtagcagctgcccttaggggtgcccctggggagctgccatctgcctggaacccatggctgctgttgcctggggaggataaatctctccctggagataaaaaggacagaaagaggccttgaagtcactccctgagactgatgccggcaacctgatctgcttggggagggggcccgactgcccccaaggacacctctgccgtggctggggtgacctcaccagacatatggtgaaacttgagagggccagggtatgggctgggagcaaagggaagcgatgagtgggggtgggtggggggagctccagaacacagccaagacaaaagggggtgccctgaggaccccatccccaacatgatctgggtggcggggagtcggaagcacagtgtcatggaacagcaagggccttggaatctgagcgatgataataaaatcgctataacagcagaagggggcttacacagcctgctgcaagccgccccacacagcccagagtctggggagctccccaattgcccaatgaccccttcaaatgcccaaatcctatgctccatccatccaagttctgggtatttatcctacaggggaaaataaatctcatatgtggcatgaagctttaccttcaatatctgatttataattccatcactgggggtttagttaaataaattaccatccagctcaacaaggaatgatcatgctaaaaatagtttgcagaagtctatttaataacacggaaaaggactgttgatgtatccttaactaggaaaaaaaatcaagttacaaacaagtacataaaatataatctcactgttggttaaataaattctctctccctaggcatagaaaaatgaagtatggaaggaaatacccatactacaagaaactatgtaggaatgtggccaaaattactagctgtcccccaatatcattctctccttttcctttagaaacagaactccagatttaaaaataaggactgtatttcccagcatcccttgcagctaggtgtgggcatgcaactaagttcaggtcagtacagcatacatggcatattatgtacaacatcttggaagtatccttgtgggttgggggaggaatgggtagggattctcttctgctattcccttttcctactgattggattgcaaatgcgatgcctggaagtgaagcagacatcttataccatgaggtagaagccacgtgttggggaaaacagagcagcattcagtaggcacttatgttcctagtgatggtacagccaacatatccgccctgggtcacctataattacagaataaggaaataaactttcatcacatttaagacactgttatttgggttttatcacaagccactgaacctaatcctaactgacagaggggcattctaaagaatttccattttcttctttcttcatttatttccctttccagatttctacaatgaacatgctactttttaagcaaaagtcatttttaacataaatgcatgtttttatttttctggatgggaggggtactaaacacacaggctctctctcgcccaccccatcacctgccccaatcatcaggacccctggcttctgtcttctcctccttggatatgtgtatccctgtgcagggaaggcagtgcccgccagtggggaacagagcagcggcaaggcaaatatgagatggaaagatttaccttctgcagaagagcctctgagctgccgaccagccctccttctctgagtcaactctggaaacctggggacccccacaagctggcctggagcttccacagcctgggccagaacacaagaatgtccaccacccagagcccacaccactgcccaggctgattaaaaccctctccactctgttcccacctagcattccttcatcacgtccatgccaggggccagaaacagagagccactggctcagaaccaactgaggctttcccaaaagacccaaattttggatttgaaacatcctccccaaggattccaccgctgactcattcagtcacagacatactctgagaggactgggaagagatagcttttttttttttacaaagtcagacttactactcctttactcccatggcacatttacaaagtccatatatgtatctataactcatttcattatatagtccacagcacaaacatattgctttgaattgtatctttaacaggctaatttcttcctgaaagcatacaaagaacctacaactgaggcctcctgggaatataccaaggcaccatccaccccggggcctttgtacttgctgttccctttgcctggaagactctttctccagatatctgcagggccccaccctcaattcattcctgtattagtctgttctcacactgctaataaagatataccagagactgggtaatttataaagaggtttaattgactcacagttccacatggctgaggaggcctcacaatcaaggcagaaggcaaatgagaagtaaagttatgtcttacatggcggcaggcaagagagcttgtgtaggggaactcccctttataaaaccatcagatctcgtgagacttactcactatcacgagaacggcatgggaaagacccgcccccatgattcaattacctcccaccaggtccctcccatgacacatgggaattatgggagctacaattcaaggtgagatttgggtggggacacagccaaaccatatcaattcccctctagaatcaaatgccagttcttctgaggccttccccgactgctccatttgaaacagacacccattcccctgcacactgtatctcatcctcctccatcccccacagcactgccctccacctgcactgagctgtttcttcacttacagttcctgtgtcccctacaaagtcagtcccaggagggtggcagcttgtttgggcagtgtccacccactggacctagaaccgtgctggactggacacagagcagatgcccagtaacaaggggttcagcaggtgactgatggtcagcatgttcgtcctgcataacaatcccacaaggtgggctactgcatcccctttttaggaaagaggaaaacagggcatgaatcacacattaggctctggagtcggccaagcctcgcacctcagttgcctcatctataaaatctgtgtaatggagcctcaccttgcaagtcgctgacatgaggattaaatctgacactgcttgtaaataacttgttgcctctgcccacggtgggagcccccggcccccaggatccagccaggatcacaggaggtgcccaataagtcctcagtaaatgtccagtgaaggggtgggcactttcaattccgtgtagcccctggaccagctcagaccaggccccttccctgggcacatttccttggcaccattccttggacctatagaaatgttggaggcctttaaaaatacgtgcattggctccaaatacaaaaggaaaactgcattgtcaaaaagaataaatcttgatttaaatgtctacaaaattaccaatcaactctgcctgtggctatgtgcacagagaatgcagggagtgtgtgctgtgggtgcatcttagcgggtgtaccatgacaggacccttggggtggttccccagatgcagcagaccctgaggcaagaagtggagtacaagtagtttctttgggaggtgggaggtgggagatggtccctggaaacaccaacagggaggtggaaccaagaagggaaggcagcccacgaagggtatgagaccaagcaagttaccaccatgaggccccagacagaccgtgtggaacgcacacctcacagccaccctcagggagtgaggaggccagggagtctgtacatcagccctgtctgtcactagtttaagggcagtgggggtgatcctggcactccccatcttccctgaaagtgacagagcagctcagagcagacaaagccatcaggcagaggagcgcaggtgctggcagtggagcgtccctctggtgtgccctggagtggttgaggtgtcgcaatgcagcctcaaaaagaaagagggtgtagggcccccccgagcttgggggggtgaaagacagggctttgcagcaccgcagccacacaggccaggcacttcagcagatgttctcctaatacacaccaggacggcctcgctgcctgttaaaacaccaaaatacttctgagctgatggggaaaatctctacatgtgcagggctgaaggtcagaggaggtggctgcggaaccacaggcagtccccggtcagacgtggaggcaggtttcacgtggagcagacacagggagcaaacagcattgcgtgtatctgaggatacagcatcacgggcagggtcaacagctggggcaaaggccccaaggcacattcagtctttccaagacaatcctatcgaaaacgcctatccctgctctgttttcctcacagcacctgtcaccatggacattatgtgtgttcattatcagtctattatccatctagcccacctgaatccaggctgcatctgcggggaacccatacacattcccctgcggaggccaaagatatggccagcattccacctcctcctcccatgccccaactctcagaagccctccctacccttagaaactctctctactccttgctagaagggcactgtatctcctaagcaagcagtatgtaagagtggatgaggctcaaaggctagaactagccacctggttcaaatcctgcccctgccacctactgctctgtgacctaggcaactgactccatctctctgggcctcatctataacatggatggggaccataaaactactgacttcatgggctattgtgaggctgatatgaaatactgcaggcaggccaggcgcggtagctcacgcctataataccagcactttgggaggctgagatgggtggatcacctgaggtcaggagttcgcgaccagcctgaccaacatagtgaaaccctgtctctacaaaaaatacaaaaattagccagccatggtggctcacatctgtaatcccagctacttgcgaggctaagacaggagaatcatttgaacctgggaagcagaggttacaatgaactgaaatcgcaccactgcactccagcctgggtaacagagcaagattccatctcaaaaaaaaaaaaaaaaaaagaaaagaaagaaaaaaagaaatactacaggcaaagcatttaaatgggctcaaatcccagctctgctgcttacaagctctaagacctgaagtaaattatttattctctctgcctccatttcctcctctataacgggggataaaatgagtacacaggattacaatgagaattacagaagctaacacacataacaagcacttgaatggtccctggtgcatagcaggtgctcaaaaaacattagctattattggccaggctcacacctgtgagctcacacctgtaatcctaacactgtgggaggccgaggcaggctgattgcttgaacccaggagttcgagcaatcaatcaatacggcaaaacctcatctctaccaaaaatacaaacaaacaaacaaaatagccaggtgtggtggcgcacacctgtagtcccagctactcgagaggctgaggtgagagcatcacttcagcctaggaggcagaggttgcagtgagccaagatcgcaccactgcacttcagcctggatgacaaagcaagaccctgcctcaaaaaaaaaaaagcattggctattatgatctccccatcttgagtttctagagtgtctgcagggagtccaagccctggtgcaggtagacagaacccactgtgcttcctaaggaaacctggatttggatcaaccacatctgtagggcttctacatgcaccaagcacactcacatttatcccacactatttttacttatttttattagttttttccatcctgcaaatagctctattattatagactgcctgcttccgagtctcctgaggtgagatgagaaggggaaggctttataaactgcagagccccccacatcctcatcaccaccagcgcacccctctgccctgccccatcctccttgctgactgccaaccacgtgacttcagcaagtcaccacacttctgagtcaatttcctggaccaaacaaaaagggggggaggagtagttgttgaggtttaagtgaaatgatgcaggtgaacactttgtaactacaaacacttcctggaaaaagtggcagaaaggctgagccaggagagggaggctggactaggaaaggggcaggaagttgcttgtgatgatattctagggggacaagtcctctccgagtaccaaccatcccagcaagtgttaaccagggcctgccgtgcaccaggcaccgagctgggtgctggagacacagatataagccatgaccctgccacggaaggacttatgcattcttacattcgcctgtgtagtcagcaaatacttactgcacacctattatgtgccaggcactgcgctaagagccaatgacacatcagtgaatgaacaaatcagactaactccccaccttcacaaagtagtggcagagacagactatacactgattttaaaataaaatggcaggtaggaatgattgctacaaagaaaactaaagcagggtaagaaaacagagaaggataaggtgggaatgccatttcaaggagctgttcagagaaagccgttctgagaagatggcatttgagcagacacagggagcaaacagcattgcgtgtatcggaggacacagcatcatgggcagggtcaacagccggggcaaaggccccgaggcacattcagtctttccaggacaatcctatcgaaaacgtctatccctgctctgttttcctcacagcacctgtcaccatggacattatgtgtgtttatatcagtctattatccatctagcccacttgagtctcacctccaggaaggcaaggatgtttgtctgtctaggtcactgtggtgtcccagagcctaggattggacccagcacacagcagaccctcgaaaaggatgtgtttaattaattagtcaatcaatcatctagagtagactactcccacccccacccagattctaggccctggtaaaaggtgcccagttctcaccccaccccgccccgttccccaccacatcgggagaggaagttgatgcaaaaaacaagttgcaacaacctgtcatgaagaggtctgatgcaacagtgggggaaggcagtgggggacactgagaggaacccaatgcttttcttcacgcagcccccatcaaggggctggggcctggcctacaaactttcctgagttcaccaacaacccatccttccttcaacagatatttatgcagagcctcctctacatgatggggctaccttatgggtctcaaactggtaactcagaggcatcattcctttggcctgcagaggggtttgagaaacttgggcctaagtttgaatatcaggtttcccattaaaatccaaattccaagcttcttttgaaaaaactgacacatgggtctcaaatgcccacaaggctgcaggtgctgtagagcagagtgatagccatcaccttcacccaggacaagtgctcctcaatttcccaccacccaacccactgctgcgccctgtgaacacctgagtgtgagacttctgtcctagacacaggcaaggcaaacctgaacctgctacttcgcctttaccctcacccagggcagacatcactaatggaatgcagatctttttcctgctaagtcttctccaagccgttcagaatttatctcccttcactgttgtcagaaatggtctaaaatccttcccattcacaacccagcttctccctactcctttgggctcctcagttgttgatttttttcctgaaaaatgggctcatcagagtgggattctagcagagattctcaactttggtaccttgacagttcagtggatagttctttgctgtgagggatgtcctgagtattataagacactcagcagcttccctgccctctaccctctagatacaaataacaaccctcctctcctcagttgtgacaatcaaaaatgtgtccagacattgcccatgtcccctggaggcaaaatcatccttggttaagaaccattgcattatagcaaagctaagaaaatggcctctagacagagccaagtattttgggttcaaatcctggttcggtcatttgctggctgtgtgaccctaaacagcctctctgtgtctcagcttccctctctatgaaatggggatataaaaatggtacctgactgctaatggtatgaagtttctttttttttttttttttttgagacaaagtctcgctctgtcacccaggctggagtgcagtggcaccatctcagctcactgcaacctccgccttctgggttcaagcgattcttctgcctcaacctcccaagtagctgggattacaggtgcatgcctccacacctggctaatgtttgtatttttagtagagacagggtttcactatgttggccatgctggtctcaaactacggacctcaggtgatgcacctgccttggcctcccaaagttctgggattacaggcgtaagccatcatgcccagccaatatgaagtttctttctgaagtgatgaaatggtcctaaaattagatggtggtacaactctatgaatataccgaaaaccattcacctgtacacttcaaatgggtaaactgtatggtggtacgtgaattatatctcacactattacaccaaaagaagaaaaaagaaatagatacctgcatcacgggggcatggggagaatttgatgggttaggataaaatgcactaggaagcactgtacgaactgtagcccttatcgtcagcaccagccctcgcccatctggggcctgcatgggcgtgtggctggaaggaaaagcctcaagtgacggagacagtggtggctgggaacaggccctgctttgggtggcatttcccgccggaatgtcctggacaaagagaaccaagtcactcggggccccaggatgcagggcggggtggctggacatcctggggtccttgtgcctgtctgcagcaggacaatgagtggaatgcggtctcctctctgtggggctgacacttgacatctgaagacaatgactttcaagaggttttgttttttcctcagtccaactattttttttccatcttcccaaacaattgttcctggggctggagggcgagcagtccccccttagctggtgaaggattgtatttgtagagtcaggaaacaatgcacaaaagtgagagaatgtaaaaatagtggcattcagggcccaggcctcagtgagggaggtgcagccatggaggtttcctcccattgatttttcccagagcctgctcggccccagggagggaattctggcagcagaagggccagtcttaggagtacagacactggctgcttggctgcagcttggggtcttcagtttagggagtgtcaactatgtacccaatgcttcccacgattgcctcatcctagacaatctcatctccattttacgaaaaaggagaccgaggttctcagtggctgacgcggcagcctcagagcatgcagctaagcagacaaagctggcctctgacctcggggccatcagagtccaggctctgactttctgccacatccactctaaccctctcttgcgatctcagcttccctgaccagccactcacttcccactagtgatggggccacatcattaaagttgtgacccccaagctccacaagggaagaaacttctgtccctggagcccaatacagtgccaggccttctgatccaacgtgaaaggagggagaacttgcaggacagaaaggacccagagcttgcagacatcagaggactctcagagaggccccaacagcccttgaccattgtggtgggctgaacaataatccctcaaagacgtccacatactaatccacggaacctgtgaatacaccaccttccatggcaaaagggactctgcagatgtgattaaggtaaggatcttggaaagggggggattatcaatagcattgaggtgggcccaacataatcacaaggatccttaaaaggaaaagaggggctaggcacgatggctgaagcctataatcccagcactttgggaggccgaggtgggtggatcacttgaggtcaggattttgagaccagcctggccaacataccaaaacccaatctctagtaaaaattaaaaaattagccagatgtggtggtgcacacctgtggtcccagctcttggaaggctgaggcgtgagaattgcttgaacacgggaagcagtggttgcagtgagccaagatagcgccactacactccaacctgggagacagagcaagactctttctcaaaaaaaaaaaaaaaagaaagaaagaaagaaaaagagggaggtaggagagtgagtgccaggggtcagaggaagaccagaagacgctatgctgctggctgggagatggacgaggccacaagccaaggaatgcaggggcctctggaagctggaaaaggcaaggaaacggattctccccagaccccccaggagcacagccctgctggcaccttgatttcagccccgtaagacccagttcagactcctgacctccagaagtgtaagataataaatctgtgctgtttaaaggcacaagaaactaatacgactgctagctcgaaacatgtacacgaaagaaaagcaaacctgttgtatctccatgaatcacggccaaacacaatcctaatactctgttattatgattactacaaaacagatattatcatacagtctagctatacatttcatacattgtttggcatatgtttagtaagctgcaaaatgctttctttccccacccacaaaagtatctacaaacaaatattcattaaggacagatggtctaataacagtaattactataataattacagcaacatcaagtatctttcactattcagatctattcagttcctgagtttagaaagcaagaagccatttagaaagatcagataagggaaaccttgggatactaagctgtcagaactagataatgcctgcatttccaatgaaacgtggacacgacaaccagctgcaacacatattaagtgcttactgcatgccaatgccaggggtacaggaggaagcgactcctacacccccatttcacagacaaggaacagagttatttgctcaaagtcatgcagaggaggaggacggagccagacctaagtgcaggccccaggggcttcagagccaagtctctttcccatggggctatactgcttcttcagttcaaaaattgggagaatttaattaggggaaggagaatagtgtagcctcgtgggaagaccaggagttgggaggcctaaatcagcgtccccaatccctgggccgtgggctgttaggaaccgggccacacagcaggaggtgagcagcaggcaagaagcaaagcttcatctgtatttagagccatccccattgcccgcatgaccacctgagctccgcctcctgtcacatcagcagcagcatcagattctcataggagcacaaaccctactgcaaaccacccatgccggggatctaggttgcaccctccttacgagaatctaatgcctgatgatctgtcactgtctcccatcacccccagatgggactgtctagttgcaggaaaacaagctcagggttcccactgattctacattatggtgagttgcataattatttcattatatgttacaatgtaataataatagaaacaaagtatacaacaaatgtaatgtgtttgaatcatcctgaaaccatcccttccccacccctaggtccgtggaaaaaaatgtcttccaggaaacccgtccctggtgccaaaacggctggggaccactggcctagatcacttaggcatccctgggtggagtgacacaaagggatcgtcacaaaaggcaaatgtggtcacccactgccctgcccagcccatcagccgctccccgcttctctgagaaccccatccagaagggctctgcaggacctgacctcagcctccaagctgtgctgcagccagaccggcctccaggatcctcagctgttccccaaacacacccagcttgctcctgcccccaggcctcagcacaggtgctccctccacctgcaacactcatctccctcctgccagctgcttcaagtctcacattccctgccctccccagtgagatccaaggttggtcagggcccaggaaacccatgcataggctcccatacttagtgccaccatgactataacttaaccttgatttatgtgatgattcaattaataacaggcttgcccaccagcctaagacctctcagaggtcccacttagtcccagtttccatcttctttcatttatgctcattcttggtgagtgagtggatggacgggtagagggagggagacccctttctctggggcaggttcctcacctgtaaaatagacactgtgtgataacactgccggcttcatggattaccatgaggactacgagaaatgctgcacactagctgaatgatttcagatgactgattcctcctctctgggcctcagtttccccatctgcacagcgcccaccactcagggcctgctgacctggttgccaaatgtagccctgccacagactcgctgtgggaccctgagaaagctgctcccacactctgttccctcgtccgcgaaacggggaacagtggtcagatgagaggatctcaaagggctcccagctctggggctatgaggtcaggcccacacattctaaccacctcgactccctgccttccagccagaccagtgacaaccagccacaccacagactacgacagctcaccagggattctgcaagggagtctttcaatggctccttccctgggggacctgactatgggacagagcccccgaggagggaggggagatgatggaaccagagaagcatgaagaagccccctcaaacgagggccctgaagaggggatggctgagagctggaagatggaggttctggtgtcagacaagctggttcaagtccccacctgtcagcgggggagggtacgtgggcctctgaacctcagtttccacctaactcagagaaggaaatagataacgaaccctaacttcagagtcgcaccagagtgaaatgccaacgcttacgttaccatcactgatggggttcttatctgtcagtgcatcgacgtaaaagcagccctctccaactacagaccacgctgtactttcccgacatttccccagagtcgtgtgtctcattccactgcagccccaatgcctagtctgcccttcctaggtcaccccaggctttttcttacctcagggactttgcacgtgctgttccccgcccctcatcgtcactgcacaggatgctcaaatatcacctccacagagagcctcccctgaccatcctggctgaagcagcctcacccaagccacaagtcgcccccgagccaccctctacctcgataatctgttttaattccctgtaatgcaggtagcacaaagtgttgttctatgcattttgctaatttagagtcctcctctctgcgcactgccagctccgtgatggtgagggtctctggctgcttgtgctgaatccacagcatgggttgaggtagacagaagatgctgaataaatactggttaagaggggaaaggaggtgaagttccataagcctccaagcttccattcctatgtatgtaacacagagtaaaagcctctatctctcagtgttcttttgaggattcaaggaaatatcactcaaaacataaagtgcttagcacagagaatggaacacaataaaaactcaaattttaaaattaccaatgtccatcaacaggagaacggatgaacaaatggtggtgttctcacacaacagaaaatgattcagtaatcaaaagaaaattgctaacacacgcagcaaactggacgcatctcaaaaacatggcccaagcgaaagaagccagacacaaaagggtgcagccacccgtgggattccacatctacgaagtcccaaaactggcaagacccttctttgatgacagaggttagaaaagccgtcactcggccgggcccagtggctcacgcctgtaataccagcactttgggaggcagaggcggccgatcacttgagttcaggagttcgagaccagcctggccaacacgatgaaaccccgtctctgctaaaaatataaaaattagccaggcatggtggctactcaggagactgaggcaggagaatcatttgaacccaggagacagaggttgcagtgagctgagatcatgccactgcactccagcctgggtgacaaagcgagactctgcctcaaaaaaaaaaaagaaaagtcgtcattcaaggctggataaagactggcaaggggctcaaggggactctggaggcaaagaatgttctagatcttcacctggtggtgatgcatacgtaatcaccaatggagctgtgcacttcactgtctgtaattatcctgcaacagaaactattcccttttttttttttcagcaaagggtttaaaaggagattgtcaccgtccaccctggtttgtctactgtccacgcatgggttgtcctggctcaagccctgagggccaatacatcgttctggcttcaggcagagccagaccccattcccattccttctacaactgtgcatccacgaagccctggcttctttgaggcccgttgccaaagagacgagccaccctccacacacaccccctcgctgcctcccaaccctgcttctaagaagattcgggaacaggaagcctgtgtctgctctcaggttctgaagcaaagaggctgggggtggtggtgcgggggaggggagatgaggggctgccccgttgaatgagacgtgccttgaatcctgaggggatcctctccaggtgtgtgagaggtgtcccccgcccaccacaggcacagggacagccacaaacacctactctaccgtcgtcgctggggcatctctaggagccccagcacccactaggcatggggccggcttcgtacatcaaagagcccttgcatgttgcctttctgcttaaaatcctccaacagaggctgcgctatcagaatgagctcacactctgtgacctcacctcctacgcaactcccttctccctcatctcctcccacactggcacccttgaaggtgcagaaacacatgagacaggctcttgccacaggacctttgcactggctgtcccctctgcctggaacgcctgtcaccacgtaaccacatgactcattcactctgctccttcaggtctctgctcaaacgtcacctcctcagtgaagcctgccctgcccacaccattgaaaactgccacatcttcccagcagcccagccctctaattttgcttcatgtttttccatagcacttaccacctgagaacactacaaattttccttggctgacaccttcactgtctgtcttcactgcacacacggtgagggagagagcttttgtctgtattgtgcactgcggcagcctggacactcagtacacagcaggtgctccataaatcacttgtaagcccaaggaggtaaatttgaggtttatcacggaatggactttctaaaattttctgcaggatttcaattgtctgctaagaatatgtgctatctttaccaattaaaaagaacaattagaaatctggttttaaaagccaggtgggagccatctctaggtcagtgggtctgatgcccaggaagcgggcataagaattacctgtcaagcttttcaaaacacatgttttgcccaggaggtataccaggaaatgacagtctgactcaagaggtctggaaaagccaggaaatcagctctttttccaaagctcccagataaccctgaagggctccaggaggtacacgaacccgagaatgggcagcagggcagggaaagcagctcagaggaggtcagggaggaccctgagcatgaccttgacaaacaggcaagatctggccagccaggcacagtggctcacatctgtaatcccagcactttggaaggctgaggcaggtggatcacctgaggtcaggagttcgagaccagcctggccaacaaggcaaaaccccatctctactaaaaataaaaaattagccagacatggtggtgcatgcctgtaatcccagctacttgggaggcagaggcaggagaatcacttaaacctgggatgcagaggttgcagtgagccaagattgctccactgcattccagcctgggtgacaaagtgaatctccatctcaaaaaaaaaaatctggccatgcagaagtgaggaaggaaaggaaactggagacccagatttgcaaacctttgcaatcacaaggcaaccccttggcagccctaatccatgaccctcaggctacagcaggcgtctgaatcacctggggcactcagtggaaatgctgattcctgggccctgaagactgagaggctccaacgcagtgggagagggaggagcctgggcatctgccttgttaacatgcttccccaggcacctgcgatggggcaccaggtttagaaggtgctggttgagtcttctggtttcagtatgtacagttgcctttcatcaggaaaattaataaagtcataggaagaaaactggaaatcacacattctgacagtgcccactgtcaatatttcaacatgtcaccttccatggcgtctcctgcagtttttaggcatggctgtcatcaccggttgcacataattttgcatgtcacctttccagtggtccacagtggctaaggaaatgggtgtggctcatgtccctaaccatttccctatccgacctttaggttgttgccgattttgagcgctcacagtggtgtttcaatgagtaacctggtacataaaagtatctggggattttccccccatgcttaggatttttttcagcagtgggatcccctgcaattccaggggaatcactgtttgggagtctcttgttgtctccgctaagtgttttgccaaagggtttgcaccaatttattgctctaaaatgatgccaaaggcaacaagttctagccgggcgtggtggctcacgcctgtaatcccaacactttgggaggccgaggcaggtgaatggcttgaacccaggaggcagaagttacagtgagctgagactgtgccattacactccagcctgggcgacaggagcaaaactccatctcaaaataaaaaaaggcaacaaaagttcaagccttatcagccgtgcagccccatcaccatgcggaggaggaacccgaggcccagctgatgctcattaagaattccttcatgccggacacggttccaagtgctttctcaacagaaacccataaatcctcaccacagccctgtgggcagggtgtgatgccacgcactagcatagaagaagcattcagcaagcgtgttttgctattattattacttgcatttgattttcctctaaaaatgatgtgtctaggctgggcgcggtggctcccatctataatcccagcactttgagaggctgaggtgggcgaatcacctgagttcaggagttcgagaccaccctggccaacatggtgaaatcccatctctactaaaaatacaaaaattagctaggcgtggtggcgggcacctgtagtcccagctactcaggaagctgaggcaagagaatcgctcgaacctgggaggcggaggttgctgtgagctgagatcgagccactgcactccggcctggctgaacagagcgagactctgtctcaaaataaataaataaataaaataactaaaaaaataaaaaagtaaaaataatgtgtccagccatatcactgagcaaaactggggttccagaaagctgggccaggtttcttgggtggcacaggtatggccctgcagggtgcccatgcccccaagaaggcgcaggtgcgcagctcgtggcagccctgtttctggtgaatcaggccggcccctgtccctgtgacactgggtgagacgtgcccatggccatacctgcagaagagatgccccagcccaagcagtgccataggaggacagcactccaatgccccaaatactgccccagccaccaaccacgggacacagacccagcagttccctttttctctttgcggaacttcccaccacatcaagctggaaaggaagtcggcagctcagcgggaggaaaggcgacagtatacaaatcgcttcatgtctgctgaggaaatttactgccctgaaactgagggctgaggaaggaggaaggggcagagcaggctgggctaggactcaccctgtccactgccgtccagccaggatggccgcatggctgagtgccaaggccaatggcgaagttgtctggagaaatcaaaacaagtgtactcagggaccacatatccctgggcaggtcactacgttcgccgacctcagttttactcatctgtaaaatgggcaaaacaggatccacaacaagagctactaaaaagatttaagtaagagaggacctgtaaagtgcttaccagcacacagtaggtgctcaagaaatgtccataactggccaggcgcggtggctcatgcctgtaatcccagcactttaggaggccgagggaggcaaatcacctgaggtcaggagttcaagaccagcctcgccaacatggcaaaacctcgtctctactaaaaatacaaaaattatctgggtgaggtggcaggtgtcggtaatctctgctactcgggaggctgaggcaggagaatcacttgaacctaggaggcaaaggttgtagtgagccgagatcacgccactgcactccagcctgagtgatagagtgagacttggtctcaaaaaaaaaaaaaaaaaaaaaaaaggaaagaaaaaggaatgtccataccaattattaagttcaagcttctcatcctggcatctagctaccacatcctaccagaggcacctctggcctccaagtgccccacactagcccctttcctgatcaccgctaagcatgtgatgcaccagcaatgcaccaaccacagagcagcaaggaactgtctcaggacagaacctctgggacctcattcattcattcagcaggtacttactgagaagcagatgagctgagactgacatgaagaggtggggacatgtggctatctaggggagactgttccagacagcaggaataccacctgcagaggaactgaggcaggagtgagcccggtgtgttcaaagaacagcaaggaaagctgagagagggcgaggtgagagcaggaagaaacgaggcaagagacttaaccaggagccagaatgtgcagtgccttctgggccacagtggggtcttcagcttttctctgggtaaggtgggagccatggagggttctgagcaggggaaggacaggatctgacctgagttcttaaggggccatctggctgtgtgtgaacaacagactgtagcagggagctcaggaggagtctcctgcaatcgtccaggcgggaggtgatggaggatttgaccagggtggtggtgagctgtggtcagaatccagaggtattccaagacagagcccacgggattttctgagagatgggatgtgagggacgagagagagggaagtcgaggccgtctccctggtttctggcctgtaccactggcaaggatgaaggccacttttattgagacaggaagactgtggtttggggggcgggtagagagttcaatctcggacattttaagtctgacctcacgcaaggcagtctggtgaaggagacagaccgtccgtcagcaaatccttgcacaatgtgcattcaactgcaatcgtgctgagtgctgggcagggtgacctaggcagaggcattcagtgaaggctgcctggaggaggacaccagagcggaggcctgaaggctgaggagctggggacacacgagggaggggttgaaagctgctatctctgtgtgtcttccactttcctcatcacttcacctcccacttcacatccagtgaggacagagcccgagaatgaaggaagtgtggtttctggggttcagagctctggggtcagacagagatagcttcaaatcccagacctacccttttcttgttgcatggcctgaagctggtgccttcaccactccctgcctcagtttctacattcataaaagagggtgattctgccatgttttcagggtgtgtcaggctctggaaacccagataaagatgcccacctctctcccccaacctgggcacctccttccagcctcagtgagaagctgctttgccagggaagctggaaggatgtgacagggcagggagtggctggacccgcacggctgaaaccactggctgaggccacagatccaggcaaatctccggcccctccgctgccctggccaggcacatggtggcccacagagattttccatcaggtcaaaacaggaactccatggaaacgcacagcctcagcctgccatggggcaaggtgtttttccacagagcgaggctgaattcagcgttaaatggctctgcagggtggcaggggccactaccctccgaaaagagaagcaggtactagccagtgggagacaggaacctgcttccagcctcagctttggggaaacaggcacctataccacacccttgctcacacggtttccaccaccgcacacgctgctcctgcatccctgaccacaccaggcactcattggttctctcggcaaatgacgcatgtagcacgtccagaaggacaggcactgctgtaggccctggggatgagcatgaacaaaagagatgaagctcctgccctcacggagctgatattctacaggggtggagctggagccagggagattcaccagaatagactgcgaagccttacgaagaaatcaagcaggaaagggagagataaagcaaggagacgggtgcttttttaaatgtggtggccaggaaaagcctccctgataagaacacgtccagctgagacccagatgaggtaaggaggtaagccatgggttaccaagggagagcacaccatgggcagtggggcagcaggggcctgcttggtgcacagggacaacaaggagaccacaatggctggagcagagtgaacaggtgagagtaaggactgggaaaggggactcaggcagggggtgatatggtttggctgtgtccccacccaaatctcatcttgagttcccacatgttatgggagggatgcaatgggaggtaattaaatgggggcaggtctttcccgtgctgttctcgtgatagtgaataagtctcaagagatcagatggctttataaggtgcggtttccctgcacaagctctctctttgcctgccgccatccatgtaaaatgtgacttgctcctccttgccttccaccacgattttaaggcctctccaggtgtgtggaactgtaagtccattaaacctcttgcttttgtaaattgcccagtgtcgggtatgtctttatcagcagtatgaaaatggactaatacaggcggttttggaaatctgggcaagaaggtaggtgggggccagaggtgcagctaaggagacagggttctgttgtaagctcagcaggcaaggccctgaggaaggagggctctcacatctaacaagcagggggaagagacaagcatcacatcctcaccaatggaggtgagcacagtgacctttcccctggacggtagaggaccccaaggcccagctggagactcccctcaccccctgaggcttattttccccctctgtaaaatggggacacaagtcctgcccagcctcctgcaggggcatctaatgaggaatgaggctaaaagagtgaagctagagtccgggtcatcctggaccacaacctcagggctgctctggcccctacaccccaacagcctcccaggttctaaagtccaatgtcccccatggaccccgcccccctcagacagccgagacaggcgctctgagagccaagatgtccaaggaggtggcacctggcaaccagatgcctgcttagcagctgtgggaggggatggcagctggactccttggcaaccagccgctggagcctggaagccaggcatcacttcagagggggagtccacggggcggggctggggacagagtttctcaggctcctttctaaagcacatgactcacaggccctcggaaaacccagcaggcccctgaattccagaacactgcttgtagggctggaggcctctactttgctctctgcctggaaactacttagtgtccagtcactgaggtatttgctcccatggccactcagtctcctctctggaagggagaccaatgcctactatgcgggcacacgtgaagattcagcattaacacaaaaaatcagaacagcaggcattcaggaagcagctaccctgtgccaggctctgtgctacgtatttctcctaagagtcagtggtagtactgttaatcccattttacagatgagaaaactgaggcacactcacaggtaaagcatcacacacagcgagtggcagagccagagactgacctccactccaggcccataaccactccaacaccctgcgatgtgcgaaaggtccgaggggtttctcccgccccttggtccagtcaacaagtaattccactcatcaatatgaataataatagttgctgttgtttattggcaactatttagcaactgggaagtgagctaacgtttatgagcaacggggaagtgaggtaagtggcccacaaaggcacactgggaagggggaagtacagcctaaatacaggctttctgatgccaaaacccgccacaccacacgaggcacaaacaccagaccaggtctgaacaacatgagctggtcatgccccaattctctaactctccagcctccagcatgaggcccaggagcccccggccacacaccaccattctcttgagggtatgaaggctttcgctggaatcccaaacccagacagtgaacggaaggctgttcaaccccagcaaccttcagaactgaccattacggttgatgctgatcccatgcctaccacccagaagtgcctacagacagggcctccggcggaatccaaggctccctaacatcacatcacaaatatctgagaacaaaacttgacagctagagtcaggcagggaggtaagaacctgaaatgctgttgccctcaagaggttaacagtctcaaggtagccacaaccacacataatggactctgatataaagaccaaggcctgaagggtcacggcaaagccaagctgtatggcttggggccggcagctgtacctctctgagactctgcatccacatctgtaaaatgggcataacgacagcagtactctgtagtgacaaagacctgcggagaggctgtggatcaagaactaagaacaatgccaaaaacacagctctgactggaagtggggttgctatcatcatcatcagcagcagcagcatcattatcgggattatcagtatttcagatcccacagccagaggtgcccaagacgtctacaccaggggctacaaacaccaatgccaacagaagccatgcaaggaaagtgactgagtgaagctggccaggagtagtacaaaagggaagggtggggactgtggcaaactggagagcagacatccatctaaagggtaagctgtgactgtgttccaatcaaatgtcgccaggcaaaagtacagccggatttctgtttccctacagaaattggaaagccatatttttgcaaaaaaaagtcctacttttaaaaccctgtgctacttaattctaatatgttcatggtaaggcaaagaaactagaatagccaaaacaattctgtaaaagaacagtgttggaggattcacattatccagttttaagaattattatggccaggcacagtggctcatgcctgtaatcccagcactttgggaggccaaggcgggcagatcacttgaggtgaggagttcaagatcagcctggccaaaaggatgaaatcccgtctctactaaaagtcaaaaatcaaaaaaaaaaaaaaaaaattagccaggcatggcacacgcctgtaatcctagctactccagaggctgaggtgggacaatcgcttgaacccaggaggtggaggttgcagtgagccaagatggtgccactgtactccagcctgggtgacagagtgagactccgtctctaaaaaaaaaaaggaactattataaagttacaataattatgatgatatggtactggtgaaaggggagacacacagatcaatggaacagaaaagagagtacaggaattgacccacacaaatatggccgtttgacttttcataaggatgcaaaggcaattccgtagagaaaggacagtcttttaaactgttgctttaaaccaatgatcttggaacaaccacacacgatatgcaaattaatgaacctcaacctaaactacacacttcatacaaaagtaaactcaaaatggatcacagatctaaattcaaaacataaaactttagaagaaaacaggagaaaatccttgtgacctgagattaagaaaagagttcttagatgtgacattaaaaaaagcaagatccgtaaaagaagaaaagggataaattagaacaaaaatgaaaacttttgccatgcaaaatacactgtcaagagaacaaaagacaagctacagatggggagaaaatatttacaaatgacatatctgacaaaggatttatattcagaatacaaccctaaattaacaaaggaaacaagccaaaatttttaatggattaaaaaacttgaacattttcttcacccaagaagtatataaatggtaaatatgcacatgaaaagataggcagcatcattagcgattaggagaatgtaagttaaaattacaatgggatacctctatgcttctacttaaacggcttttgaaaaacccgacaataccaagtgctgatgaggatgtggaaccacagaatctctcctatactgctgtggggaaagtaaattagtacagcatctttggaaaacttcccacaaagttttttggcagcttcccataaagtcaaatatctacttaccatatggcccaacaaccctgctcctggatgtttaccctagagaaatgaaaacttatgttcacacaaaaagctatacataaatatttatagcagctctattaaaaatcaccaaaaactggaaacaagcaattcaacatgtgaatggataaacaaactgtggtatatccaaacaagggagtactactcggtaatgaaaaggaacaaactgttgatacacacaacaatgcagatgaatctcaaaggctttatggtgactgaaagaagccagtctcaaaaggtggtgtacagcatgattccatttatacggaatgtgtatgttttagaaaaggcagaactacagggagaggaaatggatgagtggttgtcaggggtaacgatgggggaaggtgtgactactaaggggtggcatgagagtgttttttgggtgatggaagtcttctctatccagactgtagtggtaagtatataactctacatatgtgttaaaattcataaaactctaaacccccaaaaagtcatttttactctatgtaagcttcaaaagtcaaattaaatgtttgaaaaatttcacactgggtatcagtatggacactgggtttttcaaatatatgtgcagatagaaagatacagaagtaaatatagattgtgtaagtgtctatacatatattcctggataccatggcatccagtaacaatgagcataactactgcccagattaggtttctaaataccattctccaattaaaagagctaggggtccttaaagaactggttgatttcagggctgaggcagggaaaatacaagatgagccagaatatcttgtggttagatttcaactagtaaagaaatgctcaaaagagaccaggtgcagtggctcacacctataatcccagcactttgggaggtcaaagcaggaggactgcttgagaccaacagttcaagaccagcctgggcaacacagcaagacccatctctaccatctctacaaaataatgttttttaatgttcaaaaaaaagagaaagaagaaaaaaaatagaggaggcatgtcaaaagggcacggggtcaaccagaaagaactcctaatggccaaagttgggacaacttgaacaacaaaataaataatgacaatactggtttatgataatataaataatggaatgaatcagggagaattctttttacacaaggattttagttaataaaagtaggaggagtgaaggaaatagaaagccacgactggaagaccacagtaagagctatcacaggccagacccaccggtggatgctaaaactagtgggcaaaggttcaaacaaaaacagggtatttccacagtctcaaagaatctcccccaaaatgtctagtaattacaaaggaaaattagtaacctcaccatggagtatcctggctttcaccatcttaattaagtgttaacatctccccttgaacatatcaacatcacatgccccctgattaaaatgcacagagaggggcacatcgctcctggggtatccctcctaattacgcataagctcaagtccaaagtggcagacagtctacaaaatacctgaccaggactcttcaaaaaagtgtcaaggtcatgaaaggcaaagaaagactggggaactctcacagattacaggagactaaggggccatgctatctaaatgcaacatggtgccctaggttggatcctgaaaataaaaagaacgtttgtagggaaactaacaaaattctactgaatcttatagttaatagtactgtatcaagattaattttttctactacaaagaagtactttgtacttaggtaattatactacagtaatataaaatgtcaacgtaatgggaagctgggtgaaggatgtacaagaactctgtactatatttgcaagttttctgtaagcctacaattatctcaaaataaaaagtttcttaaagccctgtgctgaccaaaccaaatcacctactggccagacaatgcacaactacacaaggaatgtgactcatgggccacaatggtgcagcccctggcctacagctgacaccccactcctccccaaaagaagacccaagaagaactctgaacttggtgcagagaagagtccccaagtcagacaccccctgcctcatccccctaatttgtttttcatggccacaccaagagtctatagctagaaaagcacacagcctggtttgaacccaggccctgccacaaactcactgtggaatcctgggtaagggactcccccttcctcttctgaaaacagggaaggggtccacctccaggagctattatgaagctcagatgagaatgtctagctatgaatttgctacgaatttgcatgccctcatgacccagtcacctcctattaggccctatttcctgttgcattaaggattaagtttccaacaattgaaccttgggggacacattcaaaccacagcaacatgttacaattgaggaaatggaggcccacagattttaaatgacttaccctgttacagatggtgatgaatttgtactatacaaaaatcaggggagccaatgctcaggagatttggactctgggaccacctgtgccttgacctggccacagatgtctggcaagtccttctcctgctgagtctcagggtcctcatgggtgactcagtcaacaattagcaaaggaaaaagtcaggctgggtcactgatattgtttggctgtgtcctcactcaaatctcatctcgaattgtagctctcataattcccatgtgttgtgggagggacacagtgggagataattgaatcatgggggaagtttcccccatgcggttctcgtggtattgaataagtcttacaagatctgatggtttcataaaaggaaacccctttcacttggttctcattgtctcttgcccacctaagatatgccttttgccttcccccatgattgtgaggcctccccagccacgtgaaactgtgagtccattaaacctctttacctctataaattacccagtctcgagtatgtctttatcagcagcgtgaaaatggactaatacacccatatatccatttctatgaatatgtcctgttaaagtggtgagaaagtctcattaaatgtagaggaaaggtttgggatggtctggcttaaaataatggccggccagggaaggtcttctgagaagggaaaatttgagcacagaactgaaagcatgatgaggagaccaagccaggggcagatctggggaaaggacttcccaggtagaggaaacagcacaggcaagaacctagaggccgggctgtgtttagagggtccatggagcagcaggctcaataaaggattctcgctctcactgcagtgtgatgaggagtcccaggaggggcatcacaagggagaagaagtgaacaggcgagtgtcatagtctaaggtggggttagcaagatcgctctggttgctgtggacaaaaaggactgtaggaggtgacggggctacagcaacaggccaagcaaaagaggagaaggccttaaaccagagtgctggttaacagcacagcctccggaaccaggttgcctgggtttacacagcgctgccactcaccagctgcgtgaccttgggcaagagacttcacctctccgaacttcaacatcctcatttgtgaaatgaaaaagaaggatacatgcctgatatggttgaatgaagactaaagaaaataccatttgtaaagtgtgtgaaagaggaaatgtctgttagatggggtggtggcagagagggtagtgaggatgagaggcttggaaggcagaacaatgagactggccactggatgggatggtgagacagaaacagaggatggagagtgactccgaagtttttggcctgagcaagtggaagaatggaggtgccattagctgagatgagagagagagggaggaaccagttacaggggcaagatgaggaatttggttcagcacatgtgtagtttcaggtgttattttagatccaagtagcaatggcaaagagacagtggccatacccgggtgcaatccagaggtggggatggtacaaaggacacaagtgacatcaccaggaagagaagaggcccacaggtgggggctggcacccccaaaccatcggaacccaggaggcagaggagaaataacaaaggacctaagcagatgtacgggaggaaaaccgagagcccacagcaccctgacaccgtgtctcaatcataccctgcctgtctcaggagtgagattggtctcgactactcagcagcatctcccagaacaaagacacatcttaaaatgtttcttcagtatccacttcaccactacctgttacccaagtaccccaaggaagaaaagtcattgtcttcaaaataccccaaatgagctggccacttctaaagtgattcctgctcaaacagctcacctgctaatgtcccctccatgtctttatggatctcacgctcctgaatataccacagtcacaacacaaggtgaacggaaagcaaatcagttgcaaaaggaaactgcaaatcctgcaaaagatgcagggttttatgacatcagtgaaagtgatgctggagaaccacagctggctgccaggcaaagctataaacaaataaagacccaggagtcgctggctcacaatgagagtgaagaaagcccaggaagaccacataagaagttccaaaggaacttttctgaccatcagagagtgcacaagaagtccaaaaacgggctccaggggttttgcaaaatgactctttatcatcatgctataaagtgaaaccttacatgaatgatgtggcatcgtgtaatcatttaattttatcagaaaaattacacatacccccaacagtaaaaaataacacttggttccctccttgttgattctaagaattcatgcaatgttgttattacattctaaatacagttactgacgggataaaattccacctatttttaggattgtggttttcttcttcaaagtgaaggactcatctagactctacccccgccaccccacattctcaatattgctatgttagggcccattttcaatgagttctcagcagcaggcctcattttggtaacaattattctgtgacagtgaggccgtcctgatctgcacactgctggaccgaaaggcctccccctcttccctaaagaagccccttttctgggggtcaagaagccgacctgcccacaggaactgggagcccaccagaagagaaaggcaagtgggcgactgggcatgaaaccttgggaattaaatgtcctgggtcctcctgaccccacctgagcccacagcagctccttcccactccactggctggacagaagcagccacagctccctgtgtgtagccagcagaccctcccttgtgcaatctcattgaagtatatacttaaaatgggtaggttcttccagatatcatttctatttctttctctcttttttttttttgagaccgagtttcgctcttgtcactcaggctggagtgcaatggcatgatctcggctcactgcagcctccatctcccaggttcaaacgattctcctacctaagcctcccaagtagctgggattacaggcacctgccaccacacccacctaatttctgtatatttagtagagatggggtttcaccatgttggccaggctggtctggaactcctgacttcaggtgattcgcctgcctcagcctcccaaagtgctgggattacaggcgtgagccactgcacccagccagatataatttctatttcgatgaagcatatttttttaaagtgctgatctgcctgtcagcctacttcctgcctggggtctcctctgacaagcccacaggaggtttaccagcagtggctgccccgctcccacacctgtgatgggtggcagccaacaccagcccagaggacacctttagggcccactcatcgaagctgcaaagatgctgagcgccactggtacctccactgccatccattctgctcaagaaactggctttgggtgggaccccctggtggtgccaaggcttggctccagccactgtgaccacccaaggttccccaaactcatccacagagcctggcaccagatagcagagcggccagccagggctgagctcaggcctcatcgctgatgttcggactccagggacaccccctctcaccctacagaagtacctgtcccagctggccagtctctttgggcttttacctccaaccttcaagatgtcaccacctccaccggtgccagcagcccctctgctttccctcagtaagcctgtgcactcagagggttttgatccaaggcatcagcaggaaaaaaaaagtgcaccaatgtccccaaattcattccataaatactgacgagcccccatcatgtggcaggcggtggagacggagggcacaggaagacagagcttacctctagcaaagggagacagacaacacagcagcaggcaaagccacagggcagaaagagccgggatggatgggccggtgccttccagcagggggttcagaaaaggccatgaggagggtccatgaagacagtggggcctgagcgggctcatggatcacagcaggaagagaatggggctgggctggacccgagcatctgaggagcagccaggggccaggatggctctgggcagagaaagggggtgagtcggggaggtgaggtcaaacctggaatctaggcctgaacaaaactccctgggaggggtcctggtggcatgctgggggcggggggtggtaagcagctggacccccttggaggacaaataagcaacaaatctatttgcctcctttcagggcatgtaggttttggactttctaaagggctaggcaaacctacccttggggacccatcctacagagaccctagaacctgggcccaagacatgaccaacaaggagactcagggagaggagggagagcaggagagaaagaaagtggcggggaaacgggatagggtagaaaagggaggatgggggccgggcacggtggctcacgcctataatcccagcactttgggaggccgaggcaggtggatcacctgaggtcaggagttcgagaccagcctggccaacatggcaaaaccagatctctactaaaaatacaaaaattagctaggtgtggtggtgcacacctgtaatcccagctactcaggaggctgaggtgggaaaaatcgcttgaacccgggaggcagaggttgcagtgagccaagatcatgccactgcactccagcctgggtcacaaagcaagactctgtcaaaaaaaaaagagaaagaaagaaaagaaaaaaaagagaagagtagaaaagaaaagaaagagaaggaaggaaagaaaaagagagagagagaaagaaagaaaaagagagagagaaagagaaagagagaggagggtagggaggagaggaaagggagaggtggaggggagggaaagaggaggaggcgtgggaaggacaagaggtcacaaggatgcgactcctgaccctcccagccccccctccccacaacacactccaagaacctctcagaagcccccttgagcataagatgctgatgaccctctggggacccattctctgggcctcactggtggctagaaacgtccagcaaaggctgcgagaagcgggctggaaggccattcctgacaccctccttcctcaccatggtgacgggcgacagtgcccaccgcccctcaaccctggccctccctgaggaggcctggggaggattcttccttttagccctggaaacagaccctgacactcgtgtctgcttcccccgatcccaggacgacacggcacttatgaatacataaatctcataatcatgtaaaagctggctctgtctagtgatttcttttcaaagacatcataaaggtcctttataaacaaacaaaaaaaaaaaagaaagaaagaaaaaaggctgattccaaaacatcacacattacaagtgtttgaaggaacagcgaatgcccgctggcagcaaacagcccccggccagccggggtccacaagagaatgtttcagaggcctgagcactctcgagctcatttactctctctgctgctccccacattatggatttatgtaagcaggacgacgaaaaccctcgtcttcccccttacattaaaaaaaaaaaaagcaaccataaaacaaaaaacaaaacaaaacaaaaaaacatttttgcaaggaattttataagctgatctggagaacagaagaaggactaaggaaacccctaaagaagtctggttgcaaaatgttctgaaaagaaaaaacaaacttttaacacaggaacacccaatgatacattttttaagtctaattttgaaaaatgatcaaaacactttttttccccaacattacaaattacaagtggccaccagatgctggaggagggaaatatggctgtggtttgttttatcttctctgtttttaagaaacctcaaaattagggaagtcacatatacacaagcaaaggcaaggcaggaaaactgccgatgtgggagctaaacttcacttgcagatggcggaggcttcgagattaacgcacccaggaatcagccacatccagccctagagcgggggaccatgagagaatgtgtgcaaacccaaattgaacttgtaattcacttgatggatttaaaaggcccgtgggaagttttctgtaagccgggaacattttgctgctaagaaagccccaccacccagggaacaggcgggcagtgtcctcgagccttttgcaggatagaggcagatgtttggagatatgatgtaacctgggtgagtgaattcattcaaagatgagtcatgaaagcagccctcaaatgtccttcagaaatctcagtagcagaacacagagcttggacccaaatgcccacctaccaccctcaaacaggaagctcccctctttcaaagaagctctggccctgaggatgatggcaggcttcagctctttggccaccagcttctattccctcattttaccgtaaagtaccctgatgctgcttgaaaggtgttgctcatcccccacctgaggcacacagagcacaggatgaagccaattctttgtacgttgagcccctagatcaaactctacctgaagctgtaggtctagcttcatgggctattatacttcttctcttatatgagtctgactggtttgggttttcagtcactgctatggtttgaaggcatcccccacatttcatgtgttggaaacaaatacccgctgtggcaagattcagaggtggggcctgtaagaggtgactggctcataagaggctctgccctcatgaatgaattaatgcattcacggattaacgggctaatggatgaatggggtatcatgggagtggaaccggtggctttgtaagaagaggaagagaaacctgagctggcgtgttagtgtgctcagcccccctgccacgtgattccctaaactgcctcgagtctctttagaacccccaagaacgttctcaccagatgtggcccctccacctgggacttctcagcttccataactgtaagaagaaagtttcttttctttataaattacccagtttcaggtattctgttatgagcaacagaagatagactaagacactcactcacacattgagccccaccatgcaaggattaaataaaaccctgactttagctagaaccttcaaagttcggccatgtctaccccttccaaataaccaccaattcagaatggaacaagttcctccaatgtcatggaaggttcccagcttcacccaacttcacagtgcgatctaccatctgcttcctcaacatctccatccaccttcatcacgggacaacctgcagagcctcaggccctgactctgctcctcaccacagaggttttctgagtaataatgatggtaataacaacatcatcaacagtcagggcttgctgagagctcaggatgggccagtgggcttgctctaagcacgttcatatggttatctcatttaatacaacacccttagcagtgggtatcattagtctccccgtgctatagataagggagcggagtcacctgcccagagtcacacagcttgtctgtggcagggccaggctatcagccagcccccacgcagccacttgaaatgagtatttttatgttgatatgagtaactatggctatcatatcaaaaccattatttcatgaacattattaagctgagactataaagtttttaaaaagggaggaggttcagattgagtaaaaatattatatagacaatgttgtgactggtatttgaatattatacaaatcataagactgatactgaaatgagtatattgcaggaaatactggacggacagatgaacagacggacggatgacaaatggatggacagatggatggacaggtgggtgggtggggagatggatgggtgatggataaggaggaaagaagaagggagaaaaagaatgaagtgaagaaggggaggaaagaaggagaaaaatgggcctggcacgtagtaggtgctcaaccaatatgctgaatgaacccattagcaaagaagtagtagagtgctgtagttaagagtgtgggctttgaagtcagactgctggttcatgacttggctcagcctttcctcgctgaggaaccctgggcatgtgacaaaacctctctgtgccccagtctcctggactgtgaaatgggacaataggaacacttccatcaaggcagccagaagaaataagtcagttaatgaatgcagaatgctcaggacacagccggatgcatcctaagtgcttggtaagtgtcagctaacaatatgatgagtaagttgtcaaatccattctagggctgacccagtctaaccacctctctatttcagaagcaacctcaagttccacgagcctcccccgaaagtaggaacggaagagaggaaacagaggaacaaaaggctccactctccccaggctccaaggaaaaaggagggtggagggctgcaaggtaatttaagaagtttaacagggaaaaaaagtcttcaacatgagtgcggaaaaaaaaaagataaattcaatggtccaggctgcctctcgagacagctaaattctgttgtgctcattctgcatgcttcagcttttcttagactctgaggagtttttgcctaaattagagcctgcaatatgctgaagagaagaaagggaaggtgaagggaggcagagaaaggatcaggggcctgttaggcacgccctagaggaagcctggctgttccatccactccaacactgaatgccgagacagtgaaagtcaaatcccagcacctttccccacagccacagccacaagctgtgggttgcacccaagtcccacagcccagccctcagtgcactcaacactttccctgccatatcccaacatccccagcagcagccacccagattctccagaacatctgcttacctctacccaccctgtccccatcagctcccaccctccccagtcaactgaaacattactggctgctcaggtgactgctatcaccacccgggaaccccaacacatatttattcccaggaatatgtgagagggtgagagtgtgcgcatgtgcatgaataatgcatacactgtacttatgcaaggagatatgcatgcagaaaacggcaccccagctagctgacttggaactgtgcagattcatgcacacacacacacacacacactaatatcactcccttcggtaaacacagacagacaaagcacacagaaataaatcgttaccttcgcgctgctgctgccagatggcagagcctggcattgctgtgtctgcacgtctgtgcatttgtgtgtaataataacggtggctgacatgactgagctcctaccacgtgctggacgctgtcctaagtgctgcatcaaacccagaggaggtgttattattacccgtttcatagctggggaaaccaaggcacagaggtcaagtcatttgccccaaggtcaccctgctggtgaggggtaaagtcaaggactacagaataagcacccaatatgagcaagtctcgttttatgaccctggggggtgacagggaggaatcccaagatgaccagctgccatgggggtcctcaacaagcccaccgtcccagtgatgggtcaggtttcaacacaattgaaacggacaagagccagaactccccaggaaagaggggtgcccaaggttcagaaatgtttgaaatcaagttcagtgtccagcaaagtcctcaccaccagcaacaagtcaacccgggggcagagtatgcaaactggcaacccacaggtttggcccacagtcatgtttggtttggcccatgaagtgtttgttaaaaatgtgattgagttgccaacttttaaaaatcgagtgatttcataccaaaaactccacatttcctgccattggaaaatgtctttaagaagtcaagagatctggcaataccgggctcgagttcccgcacggggactgctgcctggggctgagaggtggctgcttgcttgacatgggacatgtgctccagaaggcacagattggggttgggggcctgcctgtgggggctcacttctgtgcctcagtttcttcatctgtaaaacagcttccccataggactggtgtctggcacccagcaagcactcaataaatgttaaatagcactgctgtctccccaacatccaaggcccagggcttgaggcattgttttataaaaataagagctaaggccaggcgtggtggctcatgcctgtaatcccagcactttgggaggccaggtggatcacctgaggtcaggagttcgagaccagcctgaccaacatggagaaacccggtctctactaaaaacacaaaattagctgggcatggtggctcatgcctgtaatcctagctactcaggaggctgaggcaggagaatcacttgaacccagaaggcagaggttgctgtgagccaagatcgcgccactgcactccagcctgggcaacaagagcaaaactccatctcaaaaaaaaaggagctaacacacatctagcacccgcgctgtcccaggctctgttctgagagctgtactttatgaactcactcaatcgtcccaagaaacctatgagaccattcctaggtaaaagcccaagagaaataaaaactatctccatacaaaaacttgtacactcatgtgcatagcagtattattcatagtagccaaactgtcaaaacccaaatgtccatcagctaatgaatggataaacaaaatgtatatccatataatggaatatgatacagccataaaaaaggaatgaaattctgacacatattacaatgtggaagaagccagatacaaaaaaaaaaaaaatacacacacacacacacacacacacacacacacacacatagtatgattccatttatatccatttatatgaaatgtccaaatctgtagagatagaaagtacattagtgggccaggcatggtggctcatgcctgtaatcccagcactttgagaggcaagttgggtggatcacttgaggtcaggagttcgagaccagcctggccaacattgcgataccccatatctactaaaaatacaaaaattagcctgacatggtggtatgcgcctgtagttccagctacttggaaggctgaggggggagaattgcttgaaccggaaggcagaggctacagtgagctgagatcgtgccactgcactccatcctggataacagagcaagaaactgtctcaaaataaataaataaatacatacatacataaataagtagactaatggttccagggattggggaagtggaataatggggagtgactaccaatgggtttgggttgtttttcaggtgtgattaaaacgttctgaaattagaagatagtgacagttacacaagcttctgaatataccaaaagccactggagtggacactttggggaattccttatggcatgtgaattatactcaattaaaaaattaaaaagagaaacacctatgagataggcattcttgttattcccattttacagatgagaaaaccaaggtacagagagattaagggtaaagagatgttcctctatatccacatcgatgttgaaagtagagagacaaagttagggggagagggttacgtgatttttcctgcactggctgctttaccggtcacagccatagggatctggatttgcaacccttgctcgggcaaatcatttactctctctgagcccgaggcaaaggccagacaggaatggcttttctcttaatcttgatccctctcgggtccccaaggaccctacaagtctggagcattacatggaagcattacttattcatatgtaagggtcagttctggccattaataaatgatgattttaacgactcacagtggtccactcccagggaaatgggaagaaaccattctgggttttctaggtccaagcccttcacatggctggctcagatgtcaaagcaagtggctcagtagcccatctcctcccaagtgtctggccaggagaagaaccccttactcaccaggcagaatatgacctcaccgggctaaaggatcccctcactcactagaagcccccatgggacaagaggacccctaccccacagagtgggaggacccccttatgaacacccccataatttggagcagcaggctctcactgagctactgggagctgcaaacgagcccctctaaaccaaggccctgtctctgagcacggaagggacctcaaggtgccctgcacctcattctcagatgcagggaccagcctgtgaatgaagtatcagaagccagacagtgagagggagaaacagagggagataggggcacagagaatgagactgagacagaaaaacagagagagggaaggcaaggggcggacagagagtcctgaaggaagctggaggcaaagctgggaagacagagctaaccaggacaatgaaaacaagagctctctctccactccagaaggaaagaggccaggaggcagagaggaggcccagcaggagcctttgcttggggtccttcccacactgcagggcagcaccagtactgcccaggagcccccatcagtgggtggtgggggtggcttcccagccaggctggagcctgccagggcagcctctgcagaggaggaggccggctggtcaggctgggggctgggccgggaagtgccaagcacccagccaggttgccatggccacggagacaaagagaggggctgaggagaggcccagggacagggtccctaagaggggccccggctgcctacagtcctcggggactgggccttggatgttggggagacagcagtgctatttaacatttattgagtgcttgctgggtaccagacagcagtcctatggggaagctgttttacagataaagaaactgaggcacagaagcgagccactgcagtatctcataggggtttttgtgactagcctatgagttgattaagtgaaactctttagtacagttcccaatgtattgaaaccctcacatgtcaactattattgcaaaatgtcaccaaaagtcaggtgacattgttaatgtaattctcttgcgtccttatcctcagtcactaacatgacacctgatgtgtcatgtatgtatttgatgaccggcttactgtctgcctcttaccagagggttagatccataaggacaggggctcgggtctgttccatcacccactaaacactcagctcagcccagaactgtacctggcagagctgggatgctggttctgccacgtatttgctgtgtgacccaagacaaatgactcaacccctctgagcctccatttccttatctgtggaatgggaatacaatgatgatgaccttgcccacatacagagaggctcaaagaaggatgctcctgcagcactgcttagtacagaccagtgactttcaaatgagggcaattttgcttgccccaaccccccacccctgaggacatatggcactgtctggagatatttttggttgtcacaactgaggaggagggtgcttttggctggtgggtagagccagggacgctcctaaacattctacaatgcacaggataggataatcccccacaacaaagccccaaatgtcactagagctgaggctgagaaatccagaagaaaaagaaaaaggcaggaaccaccaagatgcccatcaagaagggaatgaatgtataaactccagcagaatcgccctgcaaaatggtaggcagaagtcagaaggaagggcctgaaactgtgtaaaacaacataaaaagattatccagacatacacatcccatgagcaaagccagctcagaatgctaggtgatcctacgtttaccctcagggacccagaatttgaacccaggagctcagccccaagcctacagatttaaccacctgctccaccagcctctgctctgtatcttttaccaaaacaaatgcacgtgctcgaaagcatgctatgtcactgctgcaggttcacatcgatgtgtggcaatgacatgaacaaacacacagggaaagatctggaaagctgcacaccagcctattaacaagagcaactggggctggaggcaaccaggaacacgaaggggtaggttacctcatccacaatgcattaattttctacaagaagaatgcatttgtatttgtcatgttatgaaacattaatgaaaaattacaaatacatacactctttaacccagaaattccattcccagaaatgaataaacttacaggtatgaagtggcatgtgtctgtcccaccatgatttgtaatggcaaaagatgggcacaacctcagtgtccatcaacaggggactaatttaataataattaaaaaaaaaaaaaaagtacctccattcaacagaattctatacagctatcatttttgaaatgaggcaattccatgtgctatcatggaacaacctccatcatacaggcacaaagcaaaatgcagaaacgtgtactgtgggccccacttgtgtaacaaaaggggtacacccagactatctgaaggggcctgtatgacaccggggccagtggctgcctctggggagggaacttggaggctaacatttcattctatctcactgtatgctttttaatttgaaccatgaaaatgattacacatttatatatttatatatttatatgtgtacatatacatatatactgtatatataaatatccagttatatgtgtcgtacatcatatatggtatatataacatagatgtgatataaaatgtatataaaatagttttatatatgtatatgcgtaattatatatacatatatagttatatatacagttatatacacatataattatatacacatgtatagctgtaacattttaaattaatttaaaagacacaaaagatcatatactatataattccattttacataaagttcaaaaacaggcaaaactaatcttcgcagatacaaatcagaacagtggttacttttggggatactgactgggagaagacaccctctggggtgctggcaatatctgatctgagtgacagttattcagatatatcttattataagctcaccaagccgtttacttggtgtattgtacattttgcatacaagatatacctaaaataattaaaattttaaaattttaatggaagaaaaaggactgatcacggtggaaagcatttctggaaattctctaaattctatcatccccctttaccagagggagctctttgcttgggtccctgagaggtggccaagctagggtccagccccgcaccacaacttccccagaaaaaagccaaatgggaatcaagctggcctttgtggttgagtccagcagagcaggacaaagggccaaatgacggccccctgctccccccagaccccccccaggacactgaagcccattcatgttggaggctggccatttccccagggctccagccccctcctctcaggagctgggaacaatatccccttttaccacccctcttgtctctcacttccgcatttaattgcaagttcatgggtattaagtggcccatacagctgacccagctctctctcccctcccatccccccaaaaaagaggcccacagcgctgtctctgttcactgcccctgtgtgcccgctctttctcaatgatcttccccagagagaaagagaacgacacccccgtcggtccccgcttgtcaccttcctcaaacaaccctgttctcacccagaaagcacagtctggcaaagcgagctgctcgtggccctggcacagggcgccaggcctgcaatggcagctctgtcccgactttcccggccagcggcacatccactttgcaccccgctgtaaccccacctgatgcctgagaacactgaggcccaggagagtcgatgacaggcctgcagtcctgacagagccagtgctcagaccctcaagattcctcagcctggatctgtgactttccctaagctgccttcttgtccccattcaagggggtgcccaaagcctttgactcttaatctcttctctagctttgcaattccagggacgacgctgagctcatctgtaacctttaagggttgggaagaagtcacgtaagtcaatctcctgccttttgcatgaactcacttttgcccttgcccatggggttcctacctctggaatgtcctcaagtctgccgcatctatcctgaaagtctccacctcctccaggaagccttccaggttgtatgggtcaaggtctagtttcccctcctccactgaaaaactttatcacccacattcctccactaccaattcaagtccaacccagctctatctccatccacctcctggtccaagccaccaccatccctcactggacactgaggcagctacctaaccaatcttgctgctcctacggtccagcctccatacccacacctaagggtcctttttaaatcatccatcagaccactcttctgctctgcttaaagccctccccggcaggctgccacactgggaggaaatccctgctcctcacctcttcctggaaggccctgcatgctctgtcccattaccctcctcagccttccctccctccacaccagcaccagcctccccgctgcacttaaactctgacaagtcctttcccacctcccagcccatgcgcttgcaaactgaagtgtacctgtcaatcagctgggggccttgtcaaaagcagattctgctgcggtggatgtgaggtgagcccaagctcccacggtgatactgccaagtccctggagcacacgtggaggagctttggcatgcagtaggtgctcaacaaaattcatctcctggtgttatattcacctgactaaatttagaaggaactgtgtatctgaccctcctgctgggattaaattggaatcgcttcagatctatgcaagaccctgacttaaatctctaaatatgaattaaataacttttttctttttgagacagagtctcgctctgtcgcctaggctccagtgcaatggcgagatctcggctcactgaaacctccacctcccgagttcaagcaattctcctgaatagctgagattacaggcacgcgccaccacccacagctaatttttgtatttttagtagagacggggtttcaccacgttggccagactggtcttgaactcctgatcaagtgatccgcccacctcagcctcccagagtgctgaaattacaggcatgagccaccccacctggccctgaataaatagcattttaatttaaaatataacagctatcatttcttgagtgcccacacattttctttcatttaattctcaagactctcatatacacttggttgagggtggcaggagcttgctgcatggaagcccctcacagtccccaagtgagatccccactgcccaccacaaggacatgcagacaggcctggaagaggaaaacgttcgaaacatccctctaagcctgtgtccacccaagcacactgtcagtggcatcctaaaacgaagagcaactcctataaaccctgtggccctgccccgagcagcgcggtctatcaccctggagactgcatgtgctaaaagcgttagctggttcaaacttaagtatttcaaaagccaccctctggggccccagtcttatcctacatgcattttgttaataatacagccaaagactggaggggccttggcttcctgtgtaccccatgggtaagggttttccagccccattttagataggtggaaaatggggtacagagaggttgtcctgcaggcaagcgggcctctgtccccccacaacagggcagaggggccagctgggttgaaacccaagaagaaagtacccgtgttctcctgggtgagggggcaggggctgcgggcacaagggccctgcttatcagtggccaccagtacctctccctggctgggcacctccacccatccagataggatctcactctaatctgcctctgcgccaggggccagcagacccctgccataaagggggccttgggggactttgatgtggtagaggacagagccagcctgacttgtgggccagctgtggcggaggggagagcctaaggagcttcaaaacagtctcagcttctctcctgtccatgtgggactctggagaatttgaataaagctatttcaccaaactttacactcatttaaacttcactacaacccttaaggtagctactataatcaccccacgttttacaagtggaaaactgaggcacagagagcctaaatagcctgctcaaggtcacaccgctgggaagtggcagggctaattcaaatgcaggctgagctgacattaagggcctggatttattgataagccccttatcagtagggcgaccaacagccccagtttactgaggtctgaggggtttcctgagatgtgggacttttagttttaaaaccagaacagtcctaagcaaactggggcagttggtcactctatttaccacttgacttatcagtgagaataaagataataatagtaacagcgacagcagccaacaatccctgggcacttaggatgtgtgcccggcatcatgcaaaccccaaagcctcaccacacagtggtcctgtgaggtgggagcttttgttccctctctttccctccctcatgtcacagacgaggaaaccaaggaccagggaagctgcagaacttacctacgaggcgtaaaagggagtacagcctctcagatggcaaaagcagccagctatccatgtactgagcctctcgggcagggctaaaacaaggccccaagcaccatggtacatactgaacacgggcctttataatgagaccaatgcctttaacatacatgacacatgacctaaccactctggatgcaaatatctaattttttttttttgtagtgacaggatctcactatgttgcccaggctggtcttgaactcttaacctcaagcaatcctcccgccatggcctcccaaagtgcagggattacaggtgtgggccaccgcactcagcctgtggatgcaaataattatgggatttctaaagatatgttagcttaaaatctgccacttactagctgggtaacctttggagagttcctgcctatcaccaggataaaatggggataataagaatccttccctcacaggctgcagtgagtatcccacaagattgtgcagctgaagagcttaagacatggtctagctcgtgtgaagaaccagctactagtagcagtattcgtactggcattagtgtctatgccatcataggcagcgtggtcttttgtggaaaccatgcgagctgcgtaagcaccaaggaacatctcctctttcagcaactctccatgcctcatgcatcggtgacactgaaggtctaattctgagaagctggccagtcgggctctccctcttgctgagaaaatgagaccacaccaggcctgacaaccacacacctgcctgccctaagtcatcttgaagcaagcccagccccaccacgcagagacacccaaagagcttcctaaaaccatcctgcgacagagtcccttctggtcagagcaccatcctccagtaggtaagggccaaggcacagtttcacctccgtggatataggctttctgttgagaaaccagcctgcgtcctgcatccagtcgctcctctcctcccaccaccaccctgggccaggacacccacgtctctccccggggctgttgcagtcacctcctcactggtctccccacttatctttgtcccctgctatggtttagctatggcttatttgtccccaccaaaactcatgttgaaatctggtccccagtgaggcgatgttgagaggcagggtcgcatgggaggtgtttgagtcatggaggcggacccctcatgagtgggctggtgccatcctcacagtagtgagctctcactctggggagtctggattagttccccaagagtgggttgttataaagccaagacgccccttgggttttgtctcttcactcatgtctgctttctctctgaccttctctgccatgccatgatgcagcaggaaggtcttcatcagacaccatggccatgcccttgaacttcccagcctgtgcaactgtgagctaaataaatctcttttctttataaattacccagcttcaggcgttctgttataagcagcagaaaacaaactaagacaccctgcacacaccccatccccacccccgccaaaccatctactttcttcacggtagccaggtagccagaggggttcttttaaaaggtaagtcattcactgtcactgcctggcctaatgctcctacagcttctctacctcttacaataaaagcccaaccctttgccatggcctccaagaccctgcccaatgcagcccccacatggtgctcagatctcttctcccacccattctcccctcactcactctacccagccacaccagcctccttgatgatcctgaaattggccaagctcatccctgcctcggggcctttgcacaggctactcttcctgccttaattcccatggctggcttctcagtgtccaggtcccagctcaaaggccacctcatcagacaggcaggccttccctgatcatcagatccaaaacagcccccgactctaattcatatctctgtgttactgtctgcatagcacttgtcacttacaagatttttctcatttgttatttcttcattattcatctcccccatcccaaacatcagagatatgagagcagggattgtatctgttttgatcactgctgtttcccccatgcctggcacacagtaggaccttagtcagtatctgctgacagcatgaagacagcagaaaacaagattcctggagctctaagtatgcctgacatggtgtgggaatcccccattccctttgcaacaagggctctgagagaagccaggccgttctgcgagcttgtaacaggggccctggcccaagctggggagtgaggagcgggcaagccaaggggggctttcctgagaagacgccttagacccccaccacccagcgtgctccctggaccagtggcatcagcgtctcatctcctgggagcttgcttagaaatgcggcatctcaggccctactccagacctgctgatccaaaatctgcattggaactaggtttgcaggtagttcagaggtatagtcagatttgcgatatcctggtttaaacccccagataagtaggtaatagcaggcatggctggttcagggcatccctgggaaccaaaaggctcacggcaggcccacgaggccaatctcatgcaaaacatggcttcccagcagcacaggccagaccagaaaaagcactgaggcccatccagggaccccaagcatccttcctccctcagacccaaaataggatccaagaagctcagagccagcatatgcgggtgggggagggagaacagggagatgaacccaacagatttgcatggcagactccccgaaagccatgccatctggagcccctttgtgataaagggaaggggaacagagtgagagccaggagtattttcaaggagtggggtaagggggcaaaagaggtatgtacagggagagggagggccacctgtcaccaagaccagcagcaccccaattccacttcccaaccacctgcaacacacagggccacacacgccaaaaacagcttgtaatccacatagcatcaccccttctgcagcttcccgaggtctgatatcctggaagtcgtgccctgagtcctgctcttagtacatgtggttgtggggcagccggcacctcaccccatctacactgacgaacctgtgacccaggcgtgggcaatcagagctctggggccctctggatgggtgatacttggttcatggatgggtccatgacctcaaggtcaggccagggaacacctggatccaactgtgcctgaggccattactcctgagtcaagtaagcccagaaagtctttttttgtttgtctgtttgcttcagactcttcaagttagggtttctgtcacttacaacccaaacagtcctgagtgatacagctgttacagcacctatcatcctgtaatgtctcacttaggtgcccattttctcccctggactggagcccttgaggacacacaccattgtttgagtcatctgcgtttctgacgcccagaagaaggcctgggatataatataatcttcaggaaatacgtgacaacgactggatagctcgtccttctttcactctgcaaatatctactaagcacccactatgtgccaggcactgttctaggtgtggggacacaacagggaataaaagagacaaaaccccctgccctctgggagcttaaattctagcgaaggaagagcaggcaagaagcagaggagtcaatcaaatacaagtgccacggagaagagggagacagagggggagcatgggaggaggggtgactttcgatgggaggccagggaaggctgggctgagagggagaggcccaagacctgaagaggtcatgagtgcacaaatacctggagaatgttcccgaccaacaggacagcatgtgcaaaggccctgaggcaggagtgtgctgggcacttttggcgaaggagtcagaagaccacagactacagggcgttgggatttcctctgggtgaggtgggaggcagcgggggctcagataggacgaatgtgacctgatttacgcagggtacatgtggagaaccaggggcaagggtggaagcatgggacaagggaggagacgactgcaagagtcccagcaggagaccatggtggctgagacccggggctacccatgggaggtgagaagtggccggatcctggctgcttgtccaagttggagctgacaggatttcctgatgggttggatgtgggatgtaagaggaagagtggcgtcaagatggcccaaggaggtgccagagtgactggaaggagggggccgcaagaggagtggcggggaggaggcagcaagtttgtgatgcctgctgaatgccctcatggagatgtcgggtcatcatctagaggtcgggacagaggtcagggcaaggaatataaatttgagaaatgctggcagggcattttaaatgattgagcaagatgagctcaactacagaatgataatgaagtgacagaggaagagagggaagaaatggtccccatctccttaccaccgggctgccagtgcccaccagcctcctggctatgtgccggggagaagaaacggtgatagcagcaggacatcaactccttgttctagaacagcttgctatggacaatggagtttcacatccactgtttagcctgctccaaagaggtaggtagggcaggaattagcattccccaccccaactcatcacccagataagaaactgaggctcagtcagagaaggacaggcgggtgcaaggtgatccaggctaactcagctggctgagccacccggccaaggccaggctgcagacaccacgtgctctctgccaagtgcagctcttcaggagcagaaacagagagaccccctccaccctaccttctgcggctgccaaagacctgacacacggggaggggctgagaatatgtcttggcccgaagtgttgtggtgactggcagacaacaagtgctggcagcgaattagggagccaggaggggcagccagcaccacacacagggctgggtctccagggtcccctcagcaccgggggctcccttcttcctggacttacaggccagccccaagcccagaatcccacctcacccctctgtgccccccaacagccaccaactcttgagagagacaccagggatggggcatcctgctcccacctcagccacagggctcagcctcagggatcgagacccaggttcaaatcccagctccagtgccaactgacaatgagacttagaaccagctgtaacacctctccaagcttcaatgtccccacctgtaagacaggtggcaaatacagaaacacttccatcatcactgccgccaaagcagcgaacatgtgctgagctctcaggatgtgccagacactgctctagaccagggcttctcccgctcagtgccactgacaattggggccaggtaatactgtgtgataaggctgtgctaggcactgtaggacgttcagcagcatccctggactctacctgcttcatgacagtagcaggtagagtccagacatccttcctccccagttgtgacaaccaaaaatatctccagacattgccatatgtcccctttgggggaggggccaaactgcccttgtttgagaaccactgttctaagcccaccagaacatcagctccaggaggacaaagatctttgtccattcatcaaatctagggcctggatttgaacttaagggacctggttgcacaacttgctcagacacctgctatcctgattctcaaaggcctatgggagggtttatgtgacccaatattacatacaggtctgccccacagtaggtgtttctaaatggtcattttttgtttgttctaaactctagacttggttcattattattaataacagctaacataattaagcatttattatgtgccaggtaccaaatgaaacatcttttgcacaccatcactcatttcagaggtacaatgatcctagaaggaagggattactattactcccactttattaaggacaaaactaaggttcaaacatgttaaatgacttgccccaggtcacactcccagtaagaggaggagccgggactgaaagataacataccagcgcctctcagactttgggctttcagattggtaagttccctgacaagggagcaacaagcatttaatgagcactgactgtatgccaggcactgggctcagcatcagggataccaaggtcaagatggcccccaaacagctccaacagcaggcagaaggtgaagagggctcagtgccagtatggagggctggggctggggaaaaggaagtcagagatgcataagagtagcaggaatggcttctcagaagaggtatagggacagttcaaaggaatccgatatccattcatccatggaacagtcagagaacgcctcttcaaggtgacatctcaacagaacatagctgaagatggaggtgagccatgctgacatgagggaaaagacaactggcagggaactgtcttttttaaattattgttagtctatattaatttgaaaaatagtgtgttaattagaactagtgtagcaatgccaaaaaagtatacaaagataaagtgaaaattctttttctacactcccccccattctcagcctgaggctaccaaggctaacatctggtgcacatcctgcagtatctttctccacactcataaatacccattgagagagccttttttgtgtttttttttctctacaaaattggggtcctgctctacatttcactcagcaacttatccctccttaaaggtacagcacatacagcccctcatgtccatagagaccaacctcattctttccaacagctgtccgttaccccaacatgtggatcaacaaccatcctaatgagacttttctctgctaacggccactcacagagttgccaatttcttttgccattagaaacaaaactggaataaacatctttgtaacttacatctttacctactttttttttcttgtttctataggagaagttcctaaaggaactgaatcaaagggtatcgtgggtttttatttttaaagacactgccaatgtattttcccccaaggcagcaatcatgaacactcccaccagtgtcctctgggactgcttgcttgcctgcagccaggccagcgctgggcattatgcctcttgtgtacgtgtgacgacagtaagggatggaaggtgacgttgactgatagggtttctcagcggaaatgcagctccacacagttccaaaaaacactgccaattccagagcattctgggcccaaatgaggctagaggggtgtgggggagcaggctgtccactcagggggccctgagcaagatggggacaccttcctcccaagcccctccccatccttgcaagccgactcctgagcctgcaccatcctcatttctgaaatggatttcacacccaggagtaacaaagatggctttgtcagtaggaaaggggaggggggcactgttgtcggaacattctggatcctgttcattcaaagctctgtgtgtggggatggagagggcagagttggggaacaacggggtgcttcctgctctggggctgacctcaggcacaggcaccgtgggcagagctggagcggccccaaattccctgccatcccctcactggcacactccacaaacatttgctgagagcttaggctgtgccaggcactccgggagcactttacatttatcagctcatgcagttcatccccacagccccatcagcgaggtcacatcattaacaccactgtgcagatgagaaaatagagctccaagaaaagcagccaggactcgaggtcacacagctcgtgagcagcacaggaggacaaagcaggggcagtggactgccatctagccacctgcagaacaggctctcctgcccgggctgctgtggcagcctcctcctcagcctccaccccacctcctatcatctacccgcacaagtagccagagggatcctgcgaaaactgagtcagatctgcccctcctctgctgaaacactccaaggacaacaccacctcactcagcgacaccacctcactcagcgtagaaagcaaagcccttacaatggccctcaaggccctgtgcaatctgcccaccagcctccctactcctactgccacctctctgacttgacctcccattgctctgcccctggccattccggcctccgtgtggatcctaaaacaggctcctgcctcagggcctttgcacttgctgtttcccatgcttggaatgctctccccataaagacagaggcaaagtccttttcctgatgttacacccctagaaggggcagagcctggattcagggaagacaaaatgcacacagctgagtcttcaatagaagagaaagatgctgtgtgactctgggtaggtcagggaacctttctgagcctctgcttcctcatcgacacaataaacaggcaacgcaggaacaccttccccaccaggttcttggggggctatgttgcttggaaagtgtccactgggcacagttcctcacacatgtgggcaccagtgttataatgacatccacagggagagctggaatagtcaaggaaggcctcccaaggaggcaggataggagcaaggattctgaggtcagacatggaaaggccaagagccactgcaagcaggccatgggccaacggggctcccctgggacccaagacttgggggaaggcaaagccttccaatctgggatcgaggcaccagcacaggggagaagagatgctcccacctggcatccctccccatcttctggtcccagcaccctgggggcttccttctgggaaccactcctcccccactaccatgtggtagagctacatccctcacccaggaggcagctgccccagggaaacagagagaaattcccattcttactgaaggtggtttgagatgggttttctgtcacttgcaaccaaaggatcctgacaaccagccggctcttgccaatctcagcagtggtagcaatgccattgtctttattattgttcttgttatttcaaaatcttcaagatgagggagaaacgaggccaggggagaggccaccaataggctgcccaagagcaggaagacaccaaacctgaccgggatggtatcagggtcctgcaacctaagaagaggcccaggcagggaccctctaacgcccctggaggaacccactacttcctcccaggttctcccaaaggggcataagtgcaggaagtaggacggaccatgtgggaacctcctgtttaatagctgatgttgcagaaaagagaagggagccattgcccacaggccacaggaagtggaagtctgggaaacagattcgcaccctctaagagagacccaccttctccccttttcatctcaaagaacaagaaggaccactcacaaactggaaaacaagtctccaacttaaaacccctataggagctgggcaggtaacagggaatgctgtgcgcggctccttagtaaaagcaatgactattgtatccttttaacagagaagagtgtctttgcctagtaaacacacaggaatactcttctcttccaaagagaaacctgctaccttccactttccttaaaacacataaccctcttggtctttcagttttccatctgatacacgcaagggttagaagaaacattcctctgtcctcttaattctacaattaaaaaaaaaaaaccaggcctagtacagtggctcatgcctgtaatcccaacactttgggaggctgaggcaggagaatcgcttaagtccaggagttcaagaccagcctgggcaacatagtgagacccttatctctaaaaaaaattttttaattagctgggcatggtgacacacacctgtagttacagctactcaggaggctgaggtgggaaggtcaccccaggaggggttggaggctgcagtgagctatgatcacaccactgcactccagcctgggcagcaaggcaagatctcacctcaattaaaaaaaaaaaaaaaaaaaggcagggcacggtggctcactcttgtaatcccagcactttgggaggctgaagcaggtggatcatctcagatcaagagtttgagaccagcctggccaacatagcaaaaccccatctctattaaaaatacaaaaattagccaggcatggtggtgcacacctgtagtcccagctacttgggaggctgaggtagaagaatcacttgaacccgggaggcaggggctgcagtgagctgagatcgcaccactgcactccagcctgggcgacaagagccagactcctcctcaaaaaaaaaataataataataattaaaaaccagcagggcaagtgccataataaatggcaaccaatgtttggtctcagtgttaggaacatgttatggaggggtggagactgtggctaaatgaagactgaagccctgtgccctgcagaaggggcagctgctcttcaggtccagccaaaccaaacgttgcctgcagaagagcaagtgacacatcttctgattactaagaagccagaaataataggtttttgtatgaaatgtcttcatttttcattgctggcaagtaaataacaattttttttttattattattaaacatggggtttcactatgtttgccaggctggtcacgaactcccgacctcaggtgatccacccacctcagcctcccaaagtgctgggattacaggcctgagccactgtacccagcctaaacaaaaaattttaaaacaatcccgtgcaggctgacaaaacccacatatgagcctaacctggacttaggacccctgggtttggaaccagtggttctgatcataagtaaaaggaggggccctgctttcatcacatctgtggcctcagtagcttgtacaaggcctggcccacagcaagggtacgatcaatgacttctgaccagagttggatacacacacacacacacgtgtgcatgcaaactactgaccagacctggatacacacacacacgtgtgcatgcactctactgacaagacctggatacacacccccccacacacacacacacgtacgtgtgcatgcacactactgaccagacctggatacacacacacacgtgtgcatgcacactactgaccagacctggatacacacacacacccctcacactactgatcactgaagtcaaagaatctgaaagtgaagtttcctagagacaagggaatcccctaggacaaaacattcatccaactcatttggatacaacttaaacctccctctctgtcctccaaggagtcttagctgttggacaaaagcagactatcacggaataggagtcagaaaacctgggtttcggttccatctcaaccgcagacccacttgggatccccaggccaagtgactgaacagctcggtgcctcaatttccccttcctgaaaagcgagatgattggatgagatgatgtctcagtgtcttccagctccaacagccggtttccaggattctagtgctaataatttctttgggctaataaggaccaaagggtcctaaacccaggttttttcagccctcagttactaaattgacaaaagaaccggtagcaatcaacaaagatgcagatggactgtcattgtgaaaaactgaaaactacctaaatgccccaatataagaggaatgggtaaataatataagaggaatgggtaaataacataagaggaatgggtaaataatataagaggaatgggtaaataacataagaggaatgggtaaataacataagaggaatgggtaaataatataagaggaatgggtaaataatataagaggaatgggtaaataatgtaagaggaatgggtaaataatgtaagaggaatgggtaaaaaatataagaggaatgggtaaataatgtaagaggaatgggtaaataatataagaggaatgggtaaataataattttactagaatgctattattaaattatatattagtataataattcttataagtatagctaatatatatggaatgcttactatgtacctcgcattgttctgatagctttgcaggtcctaattcacctaattcccccctcaatctaagaagagggcactattttaggagatgaggaaaccgaggcacacacagatggagcagctgggccactgaccacacagcaggcaggcagtcaggatttgaactggacagtggccatgatccagcccccacatttcattacgaagccatgaaaggcttgctgatggagagcatttagcagtgacacgaggaagtatgcacaagcagtacctgctgtcgtgtaccaggctcagaccaaatgcaaggaacaaagaggaaatatacccaaagatgaaacagctatttggaagggtgagatctttttattcatctttatttcccaaattttctaaaatgagcgcagtaactgcaaacacagtcatacgtggtgggcgtcctagggagccggctccacacccagcactcacctactctactccacccccaacggcccagatgtcggcctgccctgcatcctgctgtatcccagcatctgggccaggcacacagtaggtgcttaacacaatgtgttggaacaagggaacaagtctatgaggtagggacagcgatttccccattttatagctgaagaaactgaggtccaagaatcagcttcccgaggtcacagagctggtcacagagcttggctctgggacaagcatgagcacatctcagtggagactctctactgaggacaatcaaaatcaccagagctggactgccaaatacaatgcgtgatccaggactagatcctggactgggggtggggatgggcgaggagatgggtatagggaacacttggggagaaatagtgaaatctgaatatagactgtgcattgtatcatttagtataaatgttgacttgcctgattttgttgttgaaggcactgtggttacacaagagaacgtctgtcttcctaagtgatgcatgccaaggtttgcaggggcatcctgtctgcaattactctcaaatagatcaaaataataataacgtgtgtgtgcatgatggagacagggaagaagaaaggaaagggagagggggagcgatcaaataaaaagttaccaaaaagttaactctgaaaagaacatattaaattgcccagaaatacaacatgtttggttttgtgcctagactgccatatgtgtgtagaaatgaataatatatgcagccaggtatacacacaaaatatcattttaccatactgggttccataagagcgcctgtagctgaacagacataagggaatgtgcttttgatactgacacctccactgtatttactacctttgtgttcaaggggaaataaatctttaaaaccacccaatcaacagcttggtgggccactggctggtggctgagaccacccagagctccctgacgtggcaaataaaactttccaatccctttgccctccccagtgtggtaagggcaggaggccaaggaacccaggctgcggctgcccctacacgtgggttcatgctcccaagacacagtcatggccaggaaggcctctgccacagagtgggccccattcagccccttttgctcatgcattcatttcttccacaaatgctaacacagtccccattaagtgctaatcaccagggacttggccatgaacacagcagacaagggctgtgacctcatgcaacttacattctaatgggagagacagatactaaacaaataaatcaacaagataattccaggcagtgacaggtcaagaagaaaatcagtgcagtggcgtagagaaagggactagaaggctctctgaggaagcggcacttgagctgagagctgaaagagaaaggggggtccttggtacaaatcagggttccaagagctccaggtaataggaagagcaaaggaaaaggcttagaggctggagccagttgaatacagtgcaagaatagaaagaaatgtggtggggcctggacagaatgaacaaggcggggagatgaggtctgcacagtgagctaaagctggatcacataataccttctaagccatcataaggagctgggattcgattaacctccatgttccacctccagcagagtgaggatgggggaggaagaggactccttgtgctgttaatgtccgtagcaaacaaaccagaatgaaatggcagggtgttggagctaaaccgaaccctgtcagtaattacattaaatatacataagctaaacagtctaattaaaaggttgcgactgtcagaatggatttagaaaagcaagacccaactatatgatgcctgtaggagatgcacttggaatataaagacacagaggcagaaacgaaaaaaatggaaaacagtaagcagaagaaaggcaacatggctatagcaatatcagacaaaataggcttcaagacaaggagcattatcagagataaaaaggagtatttcataatgataaaaggatcaattcaccaggaagacataatcataaatgtgtatttccagcaagagaactttaaaatgcaaaaagtaataactgacagaactcaaaggagaaaaacataaatctatagtcacagatggagacttccagagccttctctcaataactaccagaacaaggagaccaagcatctgtaaggatatacagatctgaacaacactaacaaccaccttgatccaaatgacatttgtagaacactgcacccaacgacagcagaagacacattcttttcaaatgtacatgaaatggtccctaaggtagactatctgctgggtcataaaccaagtctcaatttcaaaggattgaaaacccacagaatatgttctctgaacacaaattggaaatcactaaacaatgagttatctggaaaagccctaatatgtggagatcaatgcaatcagatgggcttcctcactccccaccccacactcagagtaaacagcacagacaacatctggcgtaaatgtcccctgggagaaagcagtcaggcatctgtcccgtggccaggtctaagcctacactcctaggtaacgggggtaccaggatggggtagatgctctggtttcaacttcaacaacccagttggcaaatcatttcaagagatgctggggcggccgggcacagtggctcattgcctgtaatctcagcactttgggagtcagccgagtgggcaaatcacctgaggtcaggggtttgagaccaccagcctggccaatgtggcgaaaccctgtctctactaaaattacaaaaatcagccagacgtgttggcacatgcctgtaatccccgctactcgggaggctgaggcaggagaatcgctcgaacctgggaagtggaggttgcagtgagccgagattgcaccattgcactccagccttggcaacagagtgagactctgtctcaaaaaaaaaagaaaaaaaggaaaaaaaaaaaaaaaaacagagagatgctgggggtctgtgtactgtgttggagagaccaggtcttaccagcgaggaaaccacacctcataatacagcccacctgccccgtctcgctcagaatgagccagaatgaggccaacagccaatcagttcaccttactcagggttcactctgggcagggccagagagggagtaaataaagtaaagcacagtggtcacaaatatgggctctggagtagaataatcctgagttcaaacccaccactgaccattgttggtgggcagaaccctgagatggccccaggatcactgccccctgtgtccacgccctggaggatcctttcccatttcatgtaagtgggactgtcattgtgactggtaaatgacagaggcgaagggattttgcagatataatcagggtccaaaatcagctgactgagtgagcctgacctaatcaggtaaagccttaaaagacgcctgcgggggataaagcagggagaagagtacaagtacacttctaggcccttcctaaaggaagagattcaaagcaagtgattcacctgctggccgtgatgtggctatgttgtggcaggaccacacccctaagactcaaggcacctctaggaagtgagggtgatcaccagccaataccctgcaaaaaatggggaccccggctccacaatgcacgcaactaaattctgccaacaaccctatgcagatccctcccatgccccacaccctcctcgctccaagcatcagatgagatcacagcccgggtcaacaccctgatggcagcctcatgagaccttcagtagaaaacccagttacattgcacccagacttctggcccacagaaacttcgaggtaattaacaggcgttattttaagccactaaatgtgtggtaacttgtttggcagcaacagataactaatacgccatctctgtgtgatcctaggcaagtgacctcaccctctctgggcctcagtttcctcatctgcaaaactgcaaggctgtaaatgaaacaggatgtgtaacagcctcacccagaaagtgggaagcagcgtgttctgtgccctttcaggttcatggagggatttcacagcagggcaatgggaggtgctgtcatgtatttttgagacaccaatctgttttttcaatcttcggagggattgcttggagaagagagtgaacagcaacttctagctccaacttacagccatcccagttactcccaactgccttcagagtgcacagaccaatgtccagggcaagggaccacttggtcaaaataaattcagtcacttatttcaagtcccaggaaggatctcaggcagtgtgttcaagatgatatgctgtaactgttcctctgcaaaaagtagggaaatactaagattctaaaacagaatgtttaaaaataacctcactaattactggggcctgctcaggtgccaggcagtgagccaagtgtctcaacatattttatagatgaggaaaccaaggttcagagagggaaagcttcttgcccaaggtcacacagctgctgaggcgcagagataagattcagacccagacaatctggctaggcccctggcacttgagcacaatgccacactgtaaaaaattctcctgtgcaaaatcccccagctcacatacccacatagtcaaaagacaccagaccatcttagtccccagaagtctgcacaaaaatgcttagcaattatataattcaaaacaatcacatcatgtaataaaacataggcacatatagaagcaatttttttcattcaaaaaatacttaatgagcatctactatgtagcaggcattgttggtgctggagatcaaaatctctattctcttggcatgcctgtgacattccagcgagggaggcagacaataagtaataaataagtaaaatgtccagtgtgttagctagtgggaaaaaaacaacgcaagcaaaggaagaaatggtgaggtggggatgtgcggtgtcagaaaagacccagtcaagaacatgattttgagcaaaggcctgaaggaggtggagggctgagccacggggacactgggaggtgggagggagcgcattccagacagcacaggtgcaagggccctgaggcaggtgcgtgcttggtgcatttgagaaaaggcaaatgcgcttggaggaagtgggcgagggggtaagagctacccagaagattctggaactggataatggggatgactgcataacttggtgaatatactcaaaaccaccgaatcgtacagtttgaaagggtgaggtttatgatttgtgaattcacatctcagtttttaaaactttatggggaaaaaggagtaatgaaagaggagctgagagagccaagaggggcaggtcttgtgcgacattccaggccagactaaggactgcttttatgctaagtgagatgtaactgtaactgattagggtctcactggatccctctgactgcgtaaggagaacagaatgcgggaggccagggcgagatcaaaagagtcaactgcaacggccctggccattcccggctgcgcgtcctcaggtacgccacttcccctctctgcagctattttcctcatgcaggaagtgggcctgaaaaatccatcccccacagggcagaggtgagagctaatagacagtaaagtgctgttatgatgcctatgcatggagggtggagtaccgatcccgccaaacagtttttaattatgcaaatgagtttcctgaacagaaaacaaggggcaccttcctttgtctcaggaagcagaggttcatctcgcatcaacagccctcccagcccagaggcagctgccttcacagctcatccacattctggccacagatgggggcccaaactcctctttgggtgtggttgggtccactggcctcctccaggaagcctgccctggttacttggtaacccagtacccacaggaaagctgaaacccaaagagaggacagaaccagccgtaggtcacagagcagcctgggagcaggcaggggatctgctgtgggaggggacggtacacccattcctctctgagaccttagtaagaccattgcacagtcttggtttccacgtcaccaactgacccatgccatatccaactgaaagcactctggtggctcctcacaccaccagaaataaaacccaaactgctcaccatgcatctgaggcccatgcgacctggaccccaccaacatgccaatctcatctcccttactctcccctccagccaccctggcctcttactgttcctcaaacaagcctggcacagtcctgcctcagggcctttgcatctgctgctcccactgcctggaacacacttttctccactctttccaccagggctccttctcctccttcaggacttggtcaaatgtcatctccctagaaaagccttccttgcccatcccatctaaagtagatgcgaccatccctgtcacaaacatcacctcattttatttccttctgtctgaatccactccccagctgtgtggacttcagcaagttactcagcctctcccggctttagtttccccatctgcaaaataggtataatgatgatattgacctcagggagttgctgcaagggctcaagaagcatgtggcacagtacctggaacagagcaaggcctcagtgggtgtccttattatgacaactctggtccttttctcaagggatttctttttgcggtgtctgaagattccctgagggcagagaccttgtctgtcttgttccagccacatgccagcacctagcacagtgcctggcacacagtgggtgctgaatggccatttattgaatgaataagtcgattagtggatgaaagcatcaactgcccacaccctgaccccggcctcgctcctcctgagagatgcacagaagccacccaccctcccagcaaggggggaagcacaagaccctgggtcctgacggccaatggccacctgcctgcaccagctttcagtggccccagtcccgccagcctgaaatagtctcgcctcccctggcccagaatcaagggatcgtctgtcagttccatcctggggaaggaatcaggcgggtaaacacagattgagtgtctgaccacaagacaaaagaagagcagacagattcccttctggtcctcaaggagccaagaaaataaaaataagctcaaaaatctacacagggctggaaggctggagggctctgcttcttccttgggacttcctccgggaggaggggtgagcccgcacacagtcactgtactccccagagtaaccctaggagtgctggggtcatccccattttgcagatggggaaaccaggactcagagaggcaaagcaacatccccaaggtcacacaggggaagagctgggatctgaacccaggcaaggtggctcgagagtctgtgctctaaaccatgaaccgcaagagagggagcctcccagacactctgctgggtgaaaagggcaaaccgtattatgctacttacataaacacatcaatctcacgtatttccacacaggcatgctaatgcccccacacgatctgagagcacaggtggtagtcaaaggagcttttagcccagtggttctcaactgggggctatttttcacacccaaccacctctagtggatacctggaatatctggagacatctgtggttgtcacaactggggaagaggggtcctactggcatctggtaggtagaggccagcgatgctgctaaacatcttacaatgcacaggacagcacccccacagcaaagaatggtccagccccgtatgtcgacagtgctgaaggctgagagactagtgggatttgctccagaccaacgctagggccagaaatgaccccgtgaaacctcttcaagagggacttttggccgggcatggtggctcacgcctataatcccagcactgtgggaggccaaggcgggcagaacacttgaggtcaggagttcaataccagcctggtcaacatggtgaaaccctgtctctactaaaaaaatacaaaaagtagccgggcatggtggcacgtgcctgtagtcccagctattcgggaggatgaggcaagagaatcgcttgaacccgggaggcagaggttgaagtgagccaagatcacgccactgcactccagactgggcgacagtacaagactccatcttaaaaaaaaacggggggatttttgatcctggctaaaacacagatccccagaaaaggatgtgggccaccaagctctcttcccaggtatctggggatggaactctaacaaactgagtggctactgcccttaactggtgctcacctcccctctggggacgcaatttatgtcacctgcaaaacaaggagattcagaccgaatgacccacctggcttctgttcaagatctccgaaacgcagggcaggaatcagctccgacctggccccatgtctggggaatgatgctgtgggacacagcacacaggtttgaggggcagcccaccctatcacccacctccctccagtattctagccagcatgcctgtgtctgttggaaaaaaagaaaagccccaaaaatctggagaggtcaggttctcctgcagccaggcatgacctgcttcaaacacttaaactcttgcaaaacctttaagggagagcggctgtgaagcaaataggatgtgggtttctttattaaagggagtggccccaagcccaacaggtcttcagctctctggcctgataaaggagtatctttctctccaagaaaggggtgccctgaagtctcaaaagccagagacaccaaccccattcgcgtcttcttaaagtgacagttaaattgctaccagggcaaacaccagaataaaagtaggtaggcttccagaaggtttgtctgaagaatgagttgtagaatccccacagggttgtccttcttataaggacaacgacctgttgatgacttcattctcgtggcccagaacactgcccaggatatacagcagatgctccataaatacctgcacacagagaaaagcagtctcatatcttcatggttttatctgtacagagctctctgtctgccatacattaaaaaaaatgtaacccatctaaatcctgctgacactcagtttttaccatcaaaagattttcactgacttcctgatgatgatgagcccaacacaaggtggcctgttccaggctctccggcatctgaaaactgaaataaggtggactttttgacttaattcttgcccacctgggcagcccagaggtctcacaggggcagtaattttgctcatgaacacagcctcattttggtgcaattcaggatagtggtgaagaatgtgggccatgcagccgcattacctgggtccaagtgccagttctgtcaggctgtgtgaccttgggaaactgacttggcctctctgtgtctttgtttcatttgtaaaacaggaagcataagaatacctgcaacttttgagttaatgcttaaggaacttataaacagggcttgcaagtatataaatattagcaaattgttaccattattactgttgcattaatctaataaccatgttgaaaatacaattcttcctgtcggcttcttaaaaaatatattcgcatacatatgcataattttatatgaaaagggtattataaacaggattttacttccttatcttcctggttgcctttctgtaaaagatacacatccttccatccttttctccaacctaatgtcaccttatacatataacacacgtgtatattatggttattgtttattttccaaaagaactgtgttacatatacctctcagcatcctacttttcatatgaggaccacgtgaaaatccccccaagttactggggaggtccctctgcctcaatgactgtgaaatcaaagacctgcccccaccccaaccacccgtggcatttctccctagtgtgagactaggagtacagaatcttttaaaacagaaaaaaaaatagtgacaacaaaaaaccacagtttcttgtttggcaagcggagctccaatgagaagaaaaacttttgtctcctccctccaaaaagcagaaccacagaaagcattctgggagctttctgcccacaatccctgttcctcagagactcccatcctggtcggttccgggcagaccctctgtgtctctatagctctctgtcctcagccacggggagaccttcgaggagctgctgaccaactcccacccaccggcctctctgcccacccacccaggccctctcttctctttcgaccactgcccagctgacacaccccatcatgggagttactggcacctgcccctgaggtgcctccccttggcaggtgggcccaaggtctactcagcctcctctaggggagtggggggcaagcttcaccacatccctgtgacgcaggtgctacactgtgcccgttggacagatgtggaaactgaggcacagagcaagtcagtgatcagcccaaggtcacctacagtccaagtggaagaagcctggatttgaacaccagcagcatgactccagagcctcactcaaccctcgtgccatgaacagacccggagcccagagcaagaactcggcagcctgccatttctatccgtccacagttcttcccattctgtggagaaaagaatgggagtcacagagggcaagtaacaggaggaagcgcaggcggaggtgaaacatcacacagacctgggttcaaatcccagttctgccaccttaataaatcatgtgccaagcccttcttggatcagccaaaggcggtctatcaagtggctggggacatgagttgtggggtcaggcagcctaggatcaaatcctggcaatgctgtccacctgacccagagcagctcacttagattcactttgcctcagtttcctcacctctcaatggggataaaaacagcatccccttcataaagaaaattaaatgagttgacacatgcaaagtgcttagaatggcaagtgatgaatcaaagtcagttcctgcacagcaatgactgtcattgttttcatcatgactaacgctgcccagagcacacggggagtaccccacatagccagggcctcgaaatgattcgagccaaggttctgagtcaaaaccccaggcactgtttcccccaagaccgatccagcatctctgtgaaagggctgtccttgccttttcatgattatttaataaacacacgcaaaacaccaaactcagaggactccctggagatgagggagggagtgcaacccagttcctgaaggagatggggaaagatgggaagattctcaaggaaccacaaagccctcggcctggaaccaaacaaaaccactggttcctgtggccggagtttagggtgtcaaaaggaaactcactcagagcccccatcctcctctcagtgctgacttaactcagacctcacttcctccaggaagccctctctgatcacccctgctctctggatgctgaagtcccacaaccctaattatctgtattatttaattttcctacaacaacaataataaccaatatttatataccttactgccagacactgttctaagtgctttacatcaatttctataactcacttatcttctttaaaaacctataaaataggacctattaacatccctctttttacaaataaggctcaaacaggttaaggtgtttgcccaaggtcacaagtccaaggatttaacctcaagcagtctggctccagagccttgcacttggattgttttttttaaacacccatttggccatcctccactacaccgtcctctccttgaggacagaagccacacatggcccctatcacgggggttactttccacggtttccatgggccgatgggaccttcacaccaaggacacacggagaccagggtggtcctttaaggcctgcctctaaccacatggaaataaaagcagggagggattaccgtgcattcttccaagccaggagacagcagggaaaatcccttagcaaatataaaggctgagaagagagagtgggaagacagaagagaatcacaacctgaggctgccagccttgcaaccatggaaagccttggtaattagcagttcctgaagctctaagccccaggttagttttgaaaacgaaaatgccttgggatgtttaggggccattcctgacgggccaagatgagagaggactcctgtggctcacaaacaacgtatggctggtcaggttacacaatccgtctgtttctggcaccagcttggggacacacaaaaggcccaggcagaaaggaagcccggattccccgctccttgtttcacaggtggggaaactgaggtcaggacacgtagcatgattggtccaagacacatgtccaagtcagaaccaattcatctcagaactgacacatcagatacaaaaagaaaaatgtgatgaagtcagcaaatgtaaagtgttaaggagataatgtgaaagtagagaaatctttttttttcctgtttcttgaataataagaatggttggctccaatcaatttccattattccagcttcctcctactctacacgtggacgatttaaaaccacagttaactcaaacacaatctagatctgttctaaaatgaaacacaccatctagggcaggggcgtgggagggagaggtatattttctttcccattaatatcaaaattggtttgtatttcctgtttctcttccaagcagaggagcatggagtggctcagaaggagaagtcaggagttccctagaatttgacattgctcagagacaccagggttgtctacatgtttaattcaaaaactgccagcttctaacagaacaaattcttcccccaccccccacccccgaaactgtgagagaagaagggatgggaaagaaagccaatcctgccttattcttacaggccttcctagaagggtcctttagccaaatggttttcaatgcttctgcacaaccccctctcccacatccccctgcccccagtacatctcctttcacaggcagaagggctctagtctaaggctgtctcctccctgagctggaactctgatctcacacagcctcagctgcacccctaagccatgaggagccccagaggaccccagagtctccctctttctcccaaagactaggagctacaaagcctggctctagggtctttgaaagagccacccccacaccagcccttcctgaaccaggattaaaagacttcctagagcagagaaggggagtaaatgaggccccagcaggaggcatggagattaaagactttagagtctcctaacttccatccaaggctctgccccgtcccaccccctccacccgctggccacttttctcacttcctaggagagtagggaagtggccccttcctccctctcacagaaaaaaagcaaaagaaaaatgcagcatagaataggggtttagaacaccagctgggatagtcccggttcaaagcccagtacccccacttaatcagctgtgcgatcccagacaagctacccggcccctctggagctaaactttcccaatcttaaaaacggaggaggcaggacccagtagctcacgcctgtaatccctgcactttggaggccgaggtcggcggatcacttgaggccaggagtccaagaccagcatggccaacatggtgaaatcccctctctgataaaaatacaaaaattagtcggccgtggtggctggcgcgtgcctgtaatcccagctactcgggaggctgaggcaagagaattgcttgaacccgggaggcggaggttgcagtgaaccgagattgcgccactgtactccagcctgggtgactgagggagactccgtctcaaaaaaaaatttttttaattaaaaatgggggaaatactcgtccctacttcatagaccgcctgtgaaggttaaacctgctaattaatgacacatgtaaggtgtctggcacatagtaagtggtcggttgttattttacaaagtctgaggccgtggttttgcacttggagatggggagttggtgggggtggatgcagttagggagcctggactgccgagttttgagttcgaaacccactctccccgaactccagcaaaaacctgtgcatgggggattctaccctggggttctgtcaatccccgcccctcctctgagcttcaggttttatcctactccatcaacgcgcagggacgttgggctctggggctcctacggtatgtcctagatgagtggtgcaccgggcgcgtagttattcctgggaaaaagacgcaggagcgccagctcccggcgccgccggggtccccaagcccctgcatcgcggatgtaactaattttaaaactatttgaaaggcggggacggggaagaaaagacaaaagggcagcgcgcgccgcggggaagtggagtgcgggagagccccggtcggagcaggaccgtgcgccggccagggagggaggcgacgcgacagctctggaggagctcggatcccccccgctttccgcgcgccctgcggggcgcccccgaggcaattctccacccacggggaccacggccacaggttgtggggaccgcagcggggcgagcggctggagggaaagctgtccccaagctcccgagcgacactcaccgactgcaagaagcgcaaggtgcccacgtagtccctctcggtgcccaagatctcgttgaggacgcagaggcggaggcgcagctggcgctcggactcccgggcggccgcgcacgggccggggccggagctgggcgccgcggcgccaggggcccgggggtccgggtgggcgcagtccccggccccgtcgccgccgggctcgctgccgctgggcgcctccattctagcgcggccgcgcggcgccggctccttccgtcgcgccgagcggcaactcaggcgtccaggcgccccatcccggacggggcgcgccggcgggccgggctcagcggcgggccgggctcccggcgcggcgggcgggactgggggccgggcggctgggccgggggcggaggcagcgcgcgggggccgggcgaggggcgggagggggcggccctcggggctcccagacggctggccccccgcccccgcgccagggaccgtctgccaagtgccacgccgcgctcggccgcagaggcgctctgcgcgtgcacggggcccctggggacgcggcgcggcgctcggcgcctccgtcggaagctcgggggtcgggcgggagcctccggaagggccccgcggagccgggagtccgaggccgcgcgcacgccgaaccgagcgtaccaactccgcgcccggacgcgtggcgcccccccaacccgcagtcaccgcgggctacgccactcccacccggcacacgcgacacccgccgcgcgcaggctcctgcttgcaggtccggccgctgctcgggccaagtaaacaccgggctgggaaagctcgctgcggagccgctcgggggcaagccagccccgccacgcgcgcctccgcggccccgggaagtcaggggcgaccgctgcctgggcagtgacggcccctctctgggcagtgacggcccctcccgggaacgccgggccctcgcggtgccctcggtgctaccacgaccttgggaaggaacatgcgtggcgcgcgctcgctctcacttttctctttcccgtttcctttcccatctctctctttccttccttccttttctttctgaacttctttgccccctgaccctgccctttccacctttcccagaagaaattattacctgctcttgagttattgatcaagtggcaggtaccctgcctgctcccccttccatccacccaccccatgggataaggccttgggaaacccagcttcttgtcaggttgctctgggcaatgttgatcatcacccgccttatcggaaggtatggagaggggaggaagttctggggcctagagtcagctgctcaggttcaaatcctagctccccacttgctggccgggtggccttgggctggtttccttgcttcaagatcctcagtgttttcatcagtataacgggaacgatcatggtacctagctccaaggtcctccccggggttccatgggaagtacttagcacctagaaagttctctgtaaatgtttgttcttactattattgcatgtgtgaagcccaacacctagaaagttctctgtaaatgtttgttcttactattattgcatgtgtgaacggccctctaagcctggccccactctcaaatggcccatacaatccctaatcacccgtgtttccggaccagagattgtatcgtctctgcaggggataaagtgatccacatagtatccgcctctagactgtagtcattttatggacagaaacattgcttatttattcctgttccaaaagcctaggattttcctcccattggcctctcaatactgtaagtgcctaaggacacagggagagaatggggtggcttctgccctctctgacttctttctttgggatcatgggcaaggtagcatttgatctgggccttgggctgagtgaagttcccctgggcagggagtaaaggacatgagataggtgagcctgtcacgcttgggtagtggagtcaattgtgtccaaaggtagctggttttttatttatatttttattcctaataaaggcctctggagtatctctgctttgtgactttaaactgttcacggtacctttctgagcctccgtttcctcatctttaaattaattctgtctaccacgaggggagaacatggctggaacataatggaccatggaatgaagcgggcttgcatttgtatcccagtccaaatccaactggcagggtaaccttggccaagacacgttatttctctgggcctcagtcgtctaatctgtaaaaggggagtctttgtgagagcgaattctatgcaatacagactttctcaaccttgggactattgacatttggagtcacataactctttgttgggggaggggcgtgtcctgtgcatttcaggacatttagccgcgtcccctacccactagatgccagtagcactccctccccaatctgagaatcaaaaatgtctccaggctgggcacagtggctccggcctctaatcccagaattttaggaggtccaagtgggaggattgtttgatcccagaagttcaagaccagcctgggcaacatagcaagaccctgtctctacaaaaaaattttaaaaattagctgggcatggtggcacacacctgtagtaccagctgctgggctgaggtggggagcttgcttgagcccaggaggtcagggctgcaagtaagctgtgatcacaccactgcactccaacctggacaacagagtaagccttgcctcaaaaataaacagaaaaagtgtctccagacattgccagatatccctggggacagaattgccccctgttgagaaccactgatgtaaagtacctgacacacatagctggcacagagtaggtgctcaacaaatgttagttcccttctcagcccatgaccaaggaaggttagcctcaagtttacacacaaatcccacatttcacccaagaattggcccacactgccaaaaaacatttccacgttgtggatgggtcccatctctggcccaccccaatgttttatacatcgttacttcctcagattctgctgggatctttttccccttccatccccatccccagtggtaatgatgacactaaaagataatacagcgtttagtaacatacttaagctctctgtgccttgctttcctcatctgtgaactaagaataatatcagtacctacatcataaagtcgttgcaaggttcctgagtgcatacatggagggtgcttagagcacacagtaggtgctcaataagtgaagtcttttacaatgcgtggattgagtgctgaatctaataggatgcatttggctgcaaggagaagaaaactgggctattgatagcttaaagcataaggacattatttagcaagaggtccagaggcagttggttcctgaggctggtgtaggacttcatgatgtcatcaaggatcatggcacctttgaccctcctatcctcagcatggtggcttttcctcccaagctttagggcctcagaggcacaaaatggctgctgaaacagcaacattgcctcctcacacacctccaatgaaggaaagaaaagtacgaagaagactctgtctcctctgtgcttctctctttgggggaataaacttaagctcccagcaggtcagcactagaagccatggtcacccttgaaaagtccctgaccgagggcatagattgccaccatcaacttagaaaagacctgcttagtcccctggcacaaggctgcccagacaacttggagatctgttgtcaagagagaagaggagctagcatggtgggcatctataagtgtcggccacaagcatctactacacactgggcattgggcggggtcctgaggctgcagcactgagcaccccaacagctgaggcccttgtgctgccggcattattccagcaagggggataggtgaggatgaagacaagttcctcctctcatgcattcaactattatatactgagggcctcctatgctccaggcagggatacagcagtgaacagaacagataaggtccctggcttcctggtgtgtccagtcaagagcagggagagaaggacaataaataaacaaggtcctttcagcttctctaaggcctgcaagggatgggcctggggaagcaccattggttggtggcacctccaggactctgcctcaggtcactaccccagtgtcatgattcagccatcaggattcagccaggggcctcagccttggcgggatcagtggggactccctctcttcaaaacctggctgcctcccagctaatcctggcataggcaactccctaaaccaaacatgactaagcagtcaggctggagtagatctcttcctatccccatttcaactttgacctctattcccttcttccccatcacccgtccggaatatctagtggggagcctatctgtctcatgtgtatgtcagggcagggcctgaaacagccggcagctgggtaacgttctcaaaaagaacagggaggaagaagaaaaaaaaaaaattgcagttcagggggaagaaaaaaaaagtgatgataatgatagggaaattctcttttgcagggacaattttagagtttccgttgccatgtactttgcaaatagtgggaaataccatttcgtttctgttacataagtttcacagttgagggggagaagattctgctgcttggaaacatcagagtttcttattccctgacaagcccctgtcagcttctgcaggctgaggatttgaaggcccccttcccaagctctgtttaaaaggaaaactaattaagttaaagcaaggaaaaacaagtgattttctttcccatcccaagttgaatgagccaattgagaagtgagttactgcactgcccgagggtgccatcatttcccaaatgcaaatgagttctcaaaagtcagaccagcagcccagagcagggctgttcctcattctgagaaccaagagcagctgtctgagaagaagagggaggcctctccacccttggaattagagcagctggacaactcaaatcaacgctggacacacagcccagggttcacttcttcccaccaaaatataatcgtcttcctagtagttgagctacccccagctgcccaagtcaaaacgtctctaagggaagccttgctgttggaagcacattctccagggggctctggttcaaggtctgatttaagcataataggtatccaattaagtcagggctccacagctttgccaaatcatacttttgccaggaggcattggagacactgctttgaggaagcagaaaggaaaacatctaggaccctcagttccaatcccactctgccaccaacatgcacgacttcttctccagcctttggacattgttgtagcaccagagaccagcttctcagcttcaaatcccagtcccactgcttcctaattgtgtcactttgtgtaagtgacttaacctctctgggcttcaatatccatatctgtaaaatggggtcagtaagagcttctacctcacagcgttgttgtgcaggttaaaatatttaatagatccaaagtgcatagtatgctgcccgatccttggatgggtgtttgctattgtaagtggatgaagccatgatgtctggagctatgacagccatcttgagaccctgagataggacacttctaactaactgaaggtgcaaaatgacagatggaaagaatctggatctttgatgtcactgagatcctgaattaaccaaccatggaaccaccctgcctctagacttcttgtattaaaagataataaaatgtataacatcccattttggaccttatggtcaccctatcttttctttcttttttttttttttttgagatggagtctcattctgttgcccagagtggaatgcaatgccgcgatctcggctcactgcaacctcagcctcctgggttcaagtgattctcctgcctcagcctcccaagtatctgggattacaggtgcccgccaccacgcccagctaatttttgtgtttttagtagagacaagatttcaccatgttggccaggctggtctcaaactcctgatctcaggtgatccatccgcctcgacctcccaaaatgctgggattacaggcatgagcacggcgcctggccgaccctatcctttcaaataagcattgacctgacttcttgctacttttaaaatgcaaatgccagccgggcgcggtggctcacacctgtaatcccagcactttgggaggccgagacgggcggatagcgaggtgaggaaattgagaccatcctggctaacacggtgaaaccccatctttactaaaaatacaaaatattagccggtcctggtggcgagcacctgtagtcccagctactcagaagctgaggcggagaatggcgtgaacccgggaggcggagattgcagtgagccagtgagccgagatagcgccactgcattccagcctgggcgacagagcgagactcagtctcaaaaaaaaaaaaaatgcaaatgcctcagaagggtgctggtcttcaccctattgctttcctaatggagcagagacctaaggtttataacgtgaaggctggattgggagtaaaagttgagaaaagggttcagaaagagactgatacatagaaggtaaattctgcaatttcgtcaaggccagagatcgacctggaggaaatatcttgaaattttgcagccaggaatgccagatggtttcaacagacatactggacacacatttatatgtctgggttattttttttttcccagaactgaaagctcaaaaataaagctgcccagtccaaatccagacacctggcaaccccagtggtaacttttactgaaagctgatggtttcctctgtagccggcagaaacacaaacagccacaccctctccaaatgccatttaagccgcagcctgccttccaaatttccagggcaaattccattcctgagccttttttttttgagatagggtctcactcttgtcacccaggctagagtgcagtggcacaatcacagctcactgcagcctcaaccttccaggctcaaacactcctcccatctccacctcctaagtagctgggaccccaggcatatgccaccagaactggctaattttattttttttgtagagatggggatcccactatgttgcccaggctggtcttgaactcctggcctcaagcagtcctcccacctcagcctcccaaagtgctgggattacaggtgtgaggcaccacacccattttttgagtgctcactctgtgcaaggcactgttggattacaggcacctgccaccacgcccaggtaatttttgtctttttagtagagatggggtttcaccatgttggccaggctggtctcgaactcctgacctcagctgacaccagcctcagcctcccaaagtgctgggattacaggtgtgagccactgtgcctggccctgagctggaagttttatacatcacttctgctcccaccctactggccagatcttgccacccagatggctctgtgattctttgccaagccatgccaagccactgcccaggtgttgcaggtgggctgtgggaatcttgtttccttgcgctgaaacagcaccaggcatgtgtaaataatcattgaatgaatcaatatctccagtatatgttttggactccaggttgagagaaacctcaccgtgaatgcctgggactgttctaggtactgggactagaatagtgaataaagcaaaactctgtgtcctcctgttgcttacgttctagggacagaagagacaataaataaagacccccaataagttgacagagtcagccagatcatggtaagagttacggagaaaaacaaaatggattaaacaacagggagcactggggccagcacatgcctggaggggatgagagaaggcctccctgagaaggtgacatttaagcaaagaactgaaagaagtgagggagtgggccccacctgtgttccgggcagcaggaacagcaggtgcaaaggcttggaggtaggagtgtgtccacttgttcaaggaacagcaagggggaagggtagttgagatgcatctagaaaggagaggaaaaccagatgtatgagccatatagttgaccataggactttggctttttctttggatgaactgggagctaaacagaggagagctatgacctaacttaggttctaatagaatccctctgacagctctatgggaagtaaactaagagcagggtgaggtcagaagcagtaagacctatgaggaggatactgcactagtccaggcaagagacattgatgacttgggccagggtgataccagaggagatggagagaaacagttgattctggatatgctctaaagatggagccagcaggatttgcagaggatctaggggtgaaatagagtgaaatagagttaaacacgactcgactctattagtggctcacgcctataatctatgatttttggagttggcattaaccacgatgggaaagatggcaggggtcggtggggtgctgctttggtggagaagatggagcgtttggttttggccatgttcaatgtcaaattaaatacccaagtcagatgttgagtgggcagtcacatccacaatcctgaggttccagggagaggtcaggctggagatagaaatgtagccattgtcaggatataagtgatagttaaagccttggggctgggcgagatcacccagggagggtatgtggatggagaccaggacaaggacagaggtctgggtcacaccagcattcagaatgaggcagccagtgaatggaggctggaacaggggtgagggacagttccaattgtccacaggtgttccctgactcctttaagactagacatagcaatggactctcctgtgatctcattttccctcgtgaaatagacagagggcaaagtctggagtgcagtggcacaaccatggctctgtcatctcctccagagccctgagccccaatttcttattttgttaaatgaggacattaagaaccccactctggctgggtgcggtggctcacgcctgtaatcctagcactttgggaggccatggtgggaagatcacttgaggtcaggagttcgagaccaacctggtcaacctggcaaaactccatctctactaaaaatacaaaaattagtaggtcgtggtggcacacacttgtaatccccactactctggaggctaaggcaggaaaatcgcttgaacccaggaggtggagcgagatcgcaccactgcactccacctgggcgacagagtgagactctgtctccaaaaaaaaaaaaaaaaaaaaaaaagaacctcgctctgccagctctctgagggacacagcgacataaaaagaacttacagaccccaaactgctagaaaaagtgaaaaggagttccttcccccaccatctaaccttaatctttcagaaatgtgaaactgaagcataggaaaatacttacatagattcagagaaaaccaaagagaagtagtggccagtgagatatcatctcacactaatcagaatgactattactaaaaagccaaaaaaatcacagatgccctgaggttgcgaagaaaagggaatgcttatgcactgctggtgggagtgtaaattagtttaaccactgtgggaagcagtgtggcgattcctcaaagacctaaaaacagaactaccattagacccagcaatgctgttactgggtactacccaaaggaatataaatcattctaccataaagacacatacacacgtatgttcatttcagcactgttcacaatagcaaggacatggaatcaacctgaatgcccatcagtggcagactggataaagacaatgtggcacatttacgccatgaataccatgaagccataaaaaataacaagatcatgtccttggcaggaacgtggacggagctgtaggccattatccttagcaatctaaagcaggaacagaaaaccaaatacctcacgttctcacttataagcaggagctaaatgacgagaactcatggacgcagaggggagcaacagacactagggcctacttgagggtgaagattgggaggagggagaggagcagaaaaaataactatttggtactaggcttagtatctgggtgataaaattgtctgcacaacacacccctgtgacacaagtctacctgtataacaaacctgcacaggtacccctgaacctaaaataaaagtttaatgagagagagagagacagagagaaagaaatttaaaaattgaaagaaaaaaaaaaagagtggtggcagagaaagaactacttacaactccatgcaataacatgaatgaattttagaaacatgatattgagccaacgaagccagatacaaaaaggtattatacatgatgtaggtatgattccatttatacagagctcaaaagcaggcagtattgaactacagtgctcagaggatgcagtgtgaatatagcactgcatggcaaagctgcaaagaaaagaagccaggcagcggtttcctctccggttgggaggggtctgggattcagatgagccgcacaaaggcttaagcggggctggaaacgttctatttcctaacccacatggtgacttcacagggattcactctggaatcatttgttaggttttatattgatgtcttatgcacttttccctatgtgttctctgtttcctaatttaaagatgcatcaaaaaccttaaaaataaatatatatacacctatatttacagcctttaaccaagttattcccattctgttcatctaaactacagaaaagaatcacacattcagacaaacttcgatgcgcaaagatgtgcattgcagcatcatttataatagccctatatttgaaagaacctaaattctcacaagtaagtaaatacttaaatatagtatgtccccaatttggaaaattatttagccattgaaaagtctgatgtcaaagaatatttaatagaatagaaaaaaatgctcatgatacatagatgaatggggaggaaaagagcagaaaataaattatgtgataattaaacatgtactccaataaataaatgatatgcagactgtgatcccaatattgtcaacatgtattacatattcataggaaaatgacagcaaggggccaggcacagtgcctcatgcctgtaatcccagaactttgggaggtggaggctgctggatcacttgaagtcgagtttgaaaccatcctggccaacatggcaaaaccccatctctactaaaaatacaaaaattagccgggtgtggtggcaggcgcctgtaatcccagctacttgggaggctgaggcatgagaattgcttgaaaccaggaggtggaggttgcagtgagccaagatcgtgactctgtctcaaaaaaaaaaaaaaaaaaaaaaaaaaagcaaggaaatatattttaaaataacaagagtagttacatctggggagtgggataattatgggtgtttgttttctttatacttttttcacatttccccaattttctgccatggatgtatatggctttaattctttactacactgcttttcctcctcttttgatttggaccccagatgcacagaatcagttggtcacactccttgggccatttgaccgtcaactgcattagactatggcctaggttttgttttattttcacttcttatttttgcctctgtcacccgtctccaactcctcccatttccctctcccccacagacacccacttggatatatttaaagcttgttctttagatccatctgccacacatttgtttggatctatgggtattcaaacaggcatagtagaaaatatatacagagataaagacatagtgttttatctgtgttttcaaatgtttatgtaaatggtacagagttacgcatttcatactatgttacctttttcactcaacatcctgtttctgagatcctgctttgttgctctttgtagatacaactccatgctcagtgttccattgcatgcttgcgctacctggtccatgcttgtgctacctggtcgaggctgcggactacatttcccaggcctcttgcaggtgggtggagccccataactgagttttaactcgtggatgctgttaggtgagatgtgcatcatcacctctagtgctggcccatgaaatttctcccacacatgctcctccttgctcctttcccttatagctgatagggatgacgtcccccacagtgaccttggaagccgcggttgaaggtggcagagtaactctcagtctgggtctgaatgtctccctggaggagagccagactactgatcgctaacagtcaccttggattattatgagccataaaacttccattacatttgaccctttatatgctttaaggcctgtttattacaattgcaattatttttgtttgtttgtttgtgtttgagacagagtcttgctctgttgcccaggctggagtgcagtggcacaatcatggctcactgcagccttgacctcccggactcaagccatcttcccacctcagcctcccaagtaactgtgactacaggcgcttgccaccacatcaggctaatttttgtattttttgtaaggacaggatttcactatgttccctatgctggtctcaatttcctgggctcaggtgatcctcctgccttggcctcccaaagtgctagggttacaggtgtgagccaccgtgcctgaccacgacggcaagtattaaccttaaccaaaaaaaaaaaaaaagaaaaaaaaaagcatattctatttatccatttcctagtgctagacactgttgctccaaactccttgaagcaatgccatgatgaacctcctcatacacatttccatatgcatctgtgagcaagcgttttcaggttatctaacagaaatggaatgcctgcgccatggggtttgtacatattttgtttacctgaccaaagcaatggcagagacattcaggtgtgtggggcagtgacagcagagatgttcatattcagctagccaaagtcagcatggctgcttggggtgggcaggctcaatggggctaccaaggggtcattgctagatcaaccccacagagtgctttgggcattgtttttggcacagcctttaaggctggccttctaagcatccttgagattctgtgagctcccatagctgttaataaaattagagcgagttctgttgcttacaattgcaaatccccttatttatgtatttatttatttagagacagggtcttacactgtagcccaggctggagtgcagtggcatgatcatggctcactgagacctcaaaactcctgggctcaaatgatcctcacacctcagcctcccaagtagctagtagctgattaaaaaaaaaaatgtgcagatgggggtctcactatgttgcccagactggtctcgaactcctaggctcaagccttagcctcctgagtagctaggactacaggcacgtgccaccatgcccagctaatttcatgttttgcagatacggggtttcactatgttgcccaggctggtcccaaactcttggcctcaagggatcctccacgcctcagcctccccaagggcttggattaccgatgggagccacttcaccaggtctgcaaatcccttttcatatgctagattcaggggaaggcaaacttcttctgcagagagccagaaagtaagtatttttggctttgcaagtcatacagtatcttctcagcttctcgattctgctgttgtagcaataaagcagccaaagacaataataatgaatgggtgtggctgtgttccaataaaactttatttataaaaacaatggcccacaagacataacttgttaatccctgagctagataaaaaagagacatctcctttctctaaatctctatgtagacatttatgccatgtttcttagtcttagctacttggtaaacgcttgttctcatccacacagaggggtcctcacacatggcctaacacattaccttgcctgaaatagactggatgaataaatgaatgagtgaatgaatgaatggccttaatttagaggtggtctcaatgaacaacccaggcagagaccaatcagaaccgcagccggctgtagacaacctgtgccacagaaccagcggagtacagagtatcattctttgtccttcagctgttgcatgaagactaccttcttcacaactaaccccccgcccaccctacctggctttatcccacatccctggtaggcatccatttaggggctcagtttctgaatttcagaagttaatgaggaacaagggcaactgtggggggttcagttcttaacagcaaactgttccagtgactaatccatctttcattcccagtatttttatttgtcccagcagaaatgtgtatgagtcacagctcctggataatttttttttaatgcatcattgcgtgtatatctctggcctgcagacctgcaaggtctgggtgctgttgacagggggctaatgatttcagcagcaacaacaaaagctgtcaagtcatgctaaccaggacttctttcccccatgcctatcagcatgaaagaaataaaaaaagaaaaaaaaatggacttagtgtctgattaagaatgtggcacatagagtgatttaggcggccacagacttatactttctcctaccaataactttccctttttttaagaccctgccacaaacacctcttctttcggaaagccttgattaatctaatctcaaagaccagctctcagagcagctctaaaaccactatgatttgcaaatcaaatctcaccctcttctgatctcatttctgtcttgcagtgtattcctgcagcctttgtgtagaaaattcctattctacccctttcaaataatttgtagcttgctttctggagtgtgaagtctcttccacgtgggtatattctctctctccagcgtggtgcagtgaaccgtgattgtgccactgaactccaggctgggcaacacagcaagacactgtctcaaaataaaaatctagtagccgtgtctccatccttatcatattcaattattcagtagcactcagcacagtgatttctctctccttcttaaaatatgctttttgcaccaaatcagacagagttgatttgggaattatgaagagatgaagccaaacatccacttggcccctcactggctatgtgacttcacttcttgggggccccagtttttgcatctataaatggggatgataatgatgataatcataataacagaataaaggtagataatgtttcctgagccactaatcataatatatgctcaatataaacaagggtttttcatctattttgctcattgctgtatggtcggggctagcacagagcctggcaccatttagataatcaacaaacattttttgaataaatgaattaatggattgtttcccatacttgcctaatcttaagatgcctcaccatcctcccaggaagagactccaaggtcaaccttgactctcgtattatctgtgtctagaattctaattcctcaaattgcttagtttccgtattactcaatgatcctaaagatgcaagtgacagaaatccaactcaaaccagttcagggaaaatacggaatatattgggtcatctaagcctgtctaacttcgggcatggctggatccaggtgctcaaagattgcttctttcccaagagtgtaactcagaaggctgtctctgattggtcaggattgggtcatgtgttcaatcactatgactctgaatggccaggcctgagtcatgtattttctactagaaaggaagggaggaatggtccccacaaggttaactggagccccagtactacaagaagagaaataaatgctggctaggcaataacaaagaattgagggaggctcctccagactcaccagtctacattccctcctgaacactctgccaggttaatgctataaagggcaaacatgatcaagttacttatccctgtgctcaagcaccttcactggctccctactgctgactaaagtaattatagtttgctcagcgtggcatggaaagtcctttgcaatatacctgtcttctccaggctgagggatcagtgagaaagctgttctaagaatccggacaagcaatggtgaggcatggagtttggacagcaagagtggggatgcagatgtggatttcagaaaaatccataatttcactgaaactgccttcatcaaggtcaaaaatttggactgccaagtccaaatctagtagctgtgacctggcatggtggctcatacctgtaatcccagcactttgggaggccaaggcaggaagattgcttgaggccaggagttcaagaccagcctgggcaacatattatctaaaaaattaatttaaaaaaagttagccaggcatggtggcatgcaacactagtcccagctacttgagaggctgaggtagaaacctcacttgagtctgggaggtcgaggctgcagtgaactgtgattgcaccactgcactccagcctgggcaacacagcaagaccctgtctcaaaaaaaaatctagtagctgtgtctccatccttatcatattcaattattcagtagcactcagcacagtgatatttctctccttcttaaaacatgctttttgcaggaaatatttgggataccctgtaccccccattcccttgcacggccatgttctactggccttctctggcagcagatatgtgctcagactctatcttctacacccattgaagacaccattggttgcaaaccagcaacattttccccttctccctattgaaaccccaagtttggccaccatatgcttctggagagaatgaaccctcctcacccccagcaggcagatcttaatgaaattcagccaatcatgaagaggcatgtgactcatttctaaccaataagacttgatggaaatctgctggaggcttcagggaaggtcttcttccctctcaaaacaagatacaggaaaggaaagtgacttgttctgctcttgtggcttgtggatgttgttgtgacagcacgatgtctaggggctatggcagccaacttggacccacgaacggagaccgtgccatcatggtagatggaaagatgcaaggaacctggatcctcaatgctgctcttgagccgaattacccaaccctgggactgtcctatctcaggacacattgcataaaacacattgggttcagtcttcatttacttatagcaaaagtcatcttgatggatatactgcttgtatggtaaaacttccagaaacatgactccagctataaccttctttctcacatcactccagacctacgtgggatgtttaatggacatcttcccaagcagtcctacaagcactttaaaaatgtgtcccaacttgaatcaattatctgccacattccccaaaagacttttattcactagataaatggcatcgccatctatgtgatttctctcatgagtgatcctcaagtcttttttccattcctttattcattcatgtaacgaactctcatttactaagctcctctatgcactgggcattatgcaagatgtaggggataacacagtgactaagacaaagttccatccctcgtgaagcttatatttccggttagagggagatattaaacaattaacccataactgacagcagctaagaaataaacaggatgttctcatagaaaaatacagggaggcacacacctagataaggtgatcaggggaggcttccataggcaggtaataaataagctgagatctaaatgcacagccaaaaccaactctgcaaagcatgagaagagttttctaggctgggcgcagtggctcacgctgtaatctcagcactttgggaggccaaggcaggaagattgcttggggccaggagtttgtgaccagcctgggcaacatgacgaaaagtgtctctacaacatacaaaaaaattagccaggtgtgatggtccatgcctttagtcccagctactctggaggctgaggtggaaggatcacttgagcccaggaggctgaggttgtaatgagccgtgactgtgccactacactccagcctgggtgacaaagcaagaccttgtttccaaaaaaaaaaaaaaaaaagagctttctaggcagaggaaatagcaagtgcaaaggccccaaggctggaccaaatttgagctttccagaagccgcgaggaggccagtgaggtggtaatgtggagacaggcagatccagcagggcctcaaaagtgatgtgtggattttatgctaagtgcagtgggcagccaggggaggaatttaaacaaggatgtaacatgatgtgactcaggtttttaaatggtctcacaggctattgcatggacgatggcccataataataaaaatgatcacagctaacactttgatagtagatactgtgtgccaggcattgttctaagcacattccgtatatattaactcattaagtcctcccaccgaccccatgaggtcagcaccataatcattcccattttattgatgaagaaactgaggcacagagaattacagaaacttgcctacggtcacatagccaataaatcaaagcctggcctagaggaaacaaggagactagctacaggctgtggtgcatgtccagaaagggggctgcaggcagtggggcttggattggcccaggggagaagtgcaagggaggatcccgcatataatttcacggcggagaggaaagaacttgcaggtggtcttatcctctgtccattctcactcctttctccagcaggtttttgaacttgacttctggcttggtggtctcccagcccaccttatattaatagatggggatgtcctcgctgtctcctcccccaccatcctgctgtctggcacctcgttcatctcacacaaccactccccttgaaaacagcccgaccctcctacagtacaacagtctccaccttggtcttgccctgcccactccacaccagagattaaaagccaggcagccgctcctggcggtcaaaggagagcactttgtagacgctccctggaccccagcaaaacttctattgtgttgctggagacagaaacaatgccagtggcccagttgctccccagccaaaggtggccccagcaaacagtctcccagccccatggatggggtgcctgggagtgttaacagagctccctcggggaccagagggccaggagagaagcaacatgtgcctgctggacactcccgtctacagccggctgcagcccccacccacccacgtgcctcactctaggcgaagaaaacccaaaagtaggagaggacaggccagagatggctgcttgacctttcaaggggaggcaggagtttctacaaagcctctgggagtcccctaagtatgtgttcctaccctccaggggctaggaggtcaccctctcagttcctcatcagcctgggataggttcagcggtgggtggaaaatatgaccagcaaggggcctacccacacccggggcctgctttggggctttcttaaaaagacagtgctaggatcccagaccaacaagacaccttgtgcaaagctctgtgctctaggctctcagagaataggaaagcaccctgtccttctgggtcagagtggagttaagatgagttatgcagaggcagagatttgggggagagatcaaggaatacttcatggaggagggggcctttgagagtgctctgaaaaaactgagaggattcctttctttgccctgccctccctcttccttctcttataaaaaaaaaaaaaaaaaaaacaaaccctccccaaatgactaataaataaaagacacacaaaagagacacatatgctttatctataatgtataggccgtgttgtttttgaaactcttttctgctctgtaaaggaatgtgtgtgcatcacggaaaccttggaaaacccagagcagcatatagaagaaaatgaaaattgcctctatttccaccatatagagataaaacactcttaacttgtcagagtattcctttccaggctttggtggtgttttttcatattattactaaggtgaaatttacttgcagtgaaatgcacatgtctggaatatatgactcaatgcattttgacaaatgtctacacccgtgtgtacacccttccaatcgagatctagaacattcccctcaccccagaaatttcccccgggtccccttccagtcagcccccatccttctgatttctataaattagttttgcctgccatgtaattggaatcatgtgctatgtgcttttttgtgtctggtttctttcactcaacataaacaatgtttttagatttctccacgtatcagtagcttgttctttttcattgttgagtagtgtcccattgtgtggataaatcacagtgtgttcatcctgcaagaatcttttgggttgtctccactttggggctattatgaaagagccacttataaatattggccaagtctgtgcatggatgtaggttttcatttttcctgagcaaatacttaggagtgggataactgagtcatatgattaacttttatgagaaattgtcaacagttttccaaagtggttgtaccattttatatttccaccagcactatatgagggttccaatttctcgatatcattacattttttcttttttttttttttgtttctttttgagacaagctctcgttctgttatccagtctggagtccagtggcacaattgtggctcactgcaccctcaacctttcaggctcaattgatcctcccacctcagcctcccgagtagctgagaccacaggtacacactaccacacccagctaatttttatattttttttgtagacagagcattttgccatgttgcccagactggtcttgaactcctggtctcaagcaatctgcccgcctcatcctcccaaagtgctaggattacagatgtgagccaccacacccggcctattattacttattaattacacaagtaatacatgagtatagtctcctgcaaggctaaaatacctttggataaccacctggcacccaccagtccccccagaataactaccatcagcagtttgggatgctgcttcgcagacgtttgcagaccttttcttgtacatttatatgtatagatatataacatttttagggggggtggttggagtctcgctctgtcgctcaggctggagttcagtggcgggatctcggctcactgcaacctccgcctctggcattcaaggaattctcctgcctcaccctcctgagtagctgggactacaggcacacaccactgtgctcagctaatttttgtgtttttagtagagacgggggtttcaccatattggtcaggctggtctcgaactcctgacctcaggtgatccacccacctcagcctcccaaagtgctgggattacaggcgtgagccaccatgcctggcctgatatattgactgtgccactgcactccagcctgggaaacagaggaagaccctgtctcaaaaaaaaaaaaaggaatgtttgtgcattgctaaaaccttggaaacccggagaagcatgtagaagaaaatgaaaatcacctccatttccaccatgtagcttaaacatccttaacatgtcagagtattcctctgttttctatagatatatatatacatatcactatatatgtgtgattatatatgtgtctccatagaaataaacaaaacaatactagaaacaaatacaatactagaaacagaacaatactatgtgtcttctatggatatatatatagtattgttttgtggtgactctttttacaaaaatcttgcattatatatttcttcattgtacttaccacccaggccgtattgtttgattccctgcctaggatgttagctcagctggggcagggaatttgttttgttcactgctagattcccagtgtccagcatagagtggctgctccatcaatatctgtggaatgaaaggatagtggacatattgttctgcaatttgctggcttcactctataaatataactcatagatctttccacatccacacttacagatctatttccctctgtaaactgccgcatagcatattctgtgatatgaatgtgcaaaatgtcttttacatccctctgtttgtaggttttagtaaaatcagccaaagggtcaggatttctaccaccacatacttcaaggagctcaacacattgcctacttggtggggagtgggggggaataatggtaaataggtagaatctttataatttggcaagtgagggtggtagtggggagaaaggtagcatcaaagttgtagtggggtggttatgctcactctggagccagatgttctgggttcatatcatgaccaccactgtcatgctgtgtgatcttgggcaagttactcaacttctctgtgcatcagttttccatctgaaagatgggaataataatagtaacctccaagggttgttatgagaattaaaagtctatagagcagcaatgagcacttgttaaatactctggtgttatctactgttattattcaacaaccaaagggtgtttgcctctaaggaacacatccagctcccttcagtcattttctctacctttctggcccgggtgggctctggctttcccatccactgagctagaacctttattgcagagtagagagtgacccggggcaagcggagggccgaggggaggaaacccagggaggagcagctttataggaaccaggagagaaaggagtttccagaagccagggctggtaaacagtgacaaaagctctagcagaggggtaacgatgtggacccagattaggcggttgcaatttggcagcagggaagtcaccggtgacctttgggagaaacgctggggcagaagccagcttcagagggacagggacagggacagggacagggcctgagctggggctggggagtcttccaggagctgccaactgctcttctgagaaacctggccaaattggaccatatcttgaaggagagagaaaatattttgtttttttttaaggataagaagctctgagcaggtttaagaggggaaacttatttcaagagccatgactacaggatctgagaggaggggagctgggactggaatgggagccaagagcccggcattttgatcccaacatttctgctgaatcttttcttccccgccatctccgtgcctctgcacctgccaacctccctgccaggagcacccttcctctgtctgcctggcaaactcctcttcatcttctaaattaggggttgacaaactctggccaccagccaaatccagccccccgccccctgcctgcttttgtacagcttgtgagctaagaatggttttcacattttaaatggctgggatggggggaatcaaaagaagactatttcgtgacacatgaacattatatgaaattcaaattttggcttccataaataaagttttattggcacacagccacactcctttgtttacctattgtctgtggctgctttcttgctacagtggcaaagtggaacagttgtgacagaccatgggtcctgcaaagtctgaaaaattccctatctggccttttacaggaaatgtttgctgatctctggtctaaatcgctacttgaggccgggcatggtggttcacgcctgtaatcccagcactttgggaggctgaagcgggcggatctcttgaggttaggagttcaagaccagcctggccaacatggtgaaaccccatctctactgaaaagacaaaaattacccaggcgtggtggcaggtgcttgtaatcccagctatgtgggaggctgaggcaggataattgcttgaacccaggaggtggaggttgcagtgagctgagatcacgccattgcactccagcatgggtgacggagcaagactccgtttaaaaataaataaaaataaataaataaataataaataaatctctacttgagatgaacaaaaactaccactgtctttctcagccttacctcctttgtgaccatcccttggtcctgtgagcccctttagcactgggaaccaagtcatagtatggcatggtgcacgctggttggctgtcacttgtttgttatgcatttgtccccgccttcctgaaggacctgaaccttgccctgtaggcttcaatcccccagcatggggacattgcctgatcgtccgtaaatattgatttaaatattttaaatatttaaatattgaagttcacccattcaccactctgagtctagttttctcatctgtgagagccttgaacttggtccctacgatctctaatagtctgtgggggaaggacagccaagacctcaccaggcagtatgggattatttgccaaaaatatttaaaaggacctttcgagaattccataagccacaaattcatagactgtgggccaggttttagcccaaacgtgttttgctgggtctgcacctatttttttttttaacttagatgtcaatggaaacctaacccagcccactttagtcaccagtactatctatctgcccctttcaggcatttgagtttgccattcctggatggagagttaaagaccattataaccatgtcacccaggaccccaaaaatggttctacagtcaaaggttaaggatatatttaggtcagttgttcctaaacctggtgaaatcaaatgactcaagcagtatataaaacacagatccctaggcccacccagacccaccgaaacctactctcccataggtcatggtgctggaggcggaatttttttcaagatcctcccaaaatgcttatccattatgggaatatgtattgaatcaatatctgcagatgtcaatttggctggacctgtcaaaattataaatgcacctatctcttgacctagcaattccatttctgggaatctgtcttctaaaccaatgctttttaaactttaatgtgcatacacaccccggtcatctttttaaaatgcagatcctgatggagcagatctgggttggagcctgtaatgctgcagttctaacaaagctcccatctgatgcccagctgatggtcctggaacattctgagtagcaaggccctagatctcccacacacacacccagtgatgtatgtacaagatgatgcattgtatcatagtatgtaattgcaagtatgggaaataacctaattgtccatcaataggggactagcccaataaattatggtgcatctcagaaaggaggagcattatacagccttgaaaagtatcaagtatcaaggcagtgctttaggtactggtatggaatgaactctagggcatattattttaaaagcaaggaggagaatagtgagtggagtgggtaaccacttatataaagagtgttggctgggtgggtatgtggggaatatttatatttatattcacttgtaaatgcacagaattgcctggtagaagacactagtaactggaaagggaaactgagtggatgggtgacagggaagggagggtgacattttactgtacccatttgaattttgaactacgtgaatatgatacctgtttaaaaataaacaaaaattttaaattataattatacataaatagaaagactcaccacatacttctaatgctcagacatgaatttagaccatcagaaaagctgagctgcaggtaacatggtggatgtattagtctattctcatgctgctatgaagaaatacccaagactgggtaatttataaagaaaagagatttaattgactcacagttctgcatggctgaggaagcctcaggaaacttacaatcatggctgaaggcacctcttcacagggcattaggagagagaatgagtgcaagcaggggaaatgccagaggcttatgcaaccatcagatctcagaagactccctcattatcacgagatagcatggggggaaccacccccatgattcaattacctccacctggtcctgcccttgacatgtggggattatggagattacaattcaaggtgggatttgggtggggacacagagccaaaccatatcagtaggataccttctgccttggtacaccatgcacacacacacatccaacgcacatgcacacatatgaacacacacacacttgcatacacctttaaggacagtcaatacagtgtgttgaaagcctgctgagcttaaactctgcaaacctcagttggatcccagctccaccagctgagtgacatcaagcaagacacttagcctcgatggggatgatcaaaatagtcctggctgccctgcagaccttgggtggtgagaaaactcttcataaactgtcaagcatacacatgaaaagactcattataatatgaacctggatgggtgagccagatggggcaatccacagccttctctccatggggtcccgtgcacacctctcaggacgtcactgcaaggtggaaacccaatcccttgacctttgcagtcaggcagctgctccgaacaacccctggcagtgctaatctccaactctcctctcaccatcgggtccagctgctgggctgagtcacacgcaggccgagggacaggcacatgacttgtgtgtggagctggtgtgagtgtagtggttgggggagggtagtaaagaccacaagaggtgattactccccacttagtaggaaatttcacctccaggggaggagatctaagcctgactctaggtcggaactcaagtggctgcctggcctgtctggcagaattcttcctccgggaagcccactggatgtgtatatgtgtgtgtgtgtctgacagagggaggggcagagtgtgtacaaaagaatgatactaaaaataactagccaggcacctgtggctcatgcctataatccctgctacttgggaggctgaggtgggaggatcacttgagcccaggagtttgagactacagtgagctatgattacaccactgcactccagcctgggcaacagagtgagacaccctctctaaaaaataaaaactaaaaaaaaccacatgtactaagcacttaccacatgccaacctctatcctgagcacctcgaagattaaactcattgaatctccattgatactggtatcaccatcaccattacgatcatcctcactttccagatgaagaggccgaggcccaaaacaggtaatgaattttaccaaggtcagtcatatagcccaggttcagagacagtctgattctagagcctccgctcttaacctctcagctacagggaatttcattccttgaagggggtttccagaggtcatttggcccagtgcagtgagtgagatgatggaaacagtcaaccatgtttgcacctggctgtgtgaccctgggcaaattgattacctcctgtgcttcacattttagagcctcactttcctcccctaaaatgaggatcatcacaaccatatccacctctcagggctgttttagggcttagtaataacatacttaaagtcctccacacaagaccttgttaatatgattatcataccgattattatccagtactagtgagcaaggtataaaaaatagctagaaaacccctaatcctgggcaagaaggaatcaaaatctccttcttaagcagtttgtccatatcattcatcagcaacatgtaaccaatacatcttgccttttcttcctgttgccgtcaacccttctaagaaagcaagatagggctagaaaagaaagtgcctatatcttggtcatcattttaaccactttattttttggttttggttttaataatcttgatttctgctgagagacgctcacaggagagagaccctgggtaccaagtccatcctggcggcagggggacagatgaaattcctctttcaaggttgcttccacttccacatccctgggagactcattcaatcctacagttatttagtgagcacagactctgttccagtcatctgttaggcactggggacacagcaccgaacaaggcagacaacattcttcagctcatggagctgacactccggcagaggagacagaaaataagtaagtaaagaggccaggctcagtggctcacgcctgtaatcccagcactttgggaggccaaggagggtggatcacttgaggtcaggagttcaagaccagcctggccaacatggcgaaaccccatctctactaaacctacaaaattagccggttgtggtggcatgtgcctgtaatcccagttactcaggaggctgaagcaggagaatcacttgaacccaggaggcggagattgttgcagtgagccaagatcataccactgtactccggcctgggcgatagagcgagagactctgtctcaaataaataaataaataagtaaagagatcatctaatgtttaagtttcaaaaaatgccatgaagaaaaataaaacagagtaaagggatggagagtgacgagggagcggctgttattttaaacaaggtgatcagagaaggcctcttggaaacatgacagaggagagctaatgaagtgtgtgtacctggggaaagagtattccaggtggagacagggagtggcaggtgcaatggccctgaggcagaacccagggagacagtggtagggcctaagtctggagcggcagacaaggccttgctgtctcctcctttcttctctgccaaactagggtgaggacagcggcctgctggcccacatccatcccagagttgctgggaggtaatggatgggaaattgctctgagaggctgcacagggtccagtaggagtgttattaatggatgcactggacgacgcccatgccaggggcactttaggacaaagtggtttcttctccctcctggtgagtccatgttatcctaaataccagcactgagagagcccaaacttcaaacattcccatcctctccttcaaggaatggaaacagcagggcctagagaaggcaggagaaccatccaaggccacgttgcaagttcctgccagagccccagtgtcaggatcaggctcaagactgaaaaaatactgaaccatcccattcccaggtgacaggagagtaagtaaaatcacttttcttttcttttcttcctaaaaggttgttacttcccctagggcaagagggggatgagactctttgccgggtggatgggctgggaaaaacaacagtttgcaaaacaaattaaatgtgttaaatggccagtttctcccaccagtgggtctctttgccctcagcaagtgacttctcaacttctcctttgtggttttcaaaacattcccctaaatttctttttttgttttgttttgtgacagtcttgctttatcacccaggttggaatgcagtagcatgatctcggttcactgcatcctctgcctcccaggttcaagcaattctcctgcctcagcctcccgagtagctgggattacaggtgcatgccaccatgcccggctaatttttgtattttagtagagacagggtttcaccatgttggccaggctggtctcgaactcccaacgtcaggtgatccacactcctcggcctccccaagggctgagattataggcatgaggcacggtgcccagcctacccctaaatttcttaggtccttgccacccatggtgtataagagtcagagaagatattgggctctttggcccctttccacagatgaggaaactgaggcccagagtagggaaacacacctcatctgagacacttgggctccacagttaggagctgaccttctctctaaaagaagtgactataaaccggtataagataacataatgagaaaggtaatttcagaggatgccaagagctatggatgaaataaaccagagggcttggccgggcacagtggctcatgcctgtaatcccagccctttgagatgccatggcgggggaatcacttgagcccaggagtttgaacctgcaatgagctatgatcacaccactgcactccagcctgggagacagttttttaaaaaaaccagccttgagctcaggagtttgagaccagcctgggcaaatagcgaaaccctcgcctcatctttacaaaaaattcaaaaattaacagagcatggtggtgcatgcctgtggtcccaattactcgggaggctgaggtggcaggatcacttgaaccaagaaggttgaggttgcagtgagctgtgatttcgccactgcactccagcctgggtgacagagtaagaccctgtgtcaaaacaaaacaaaaaaaggtaggattggcaggactactttagtggtggtcagtgaagggtcccgggggagtttgcatatgagctggtcctgtagcttgagcaacaagcagccatgcccagagccaggtaaaaggggggtctgggccaaggggtggcaaatgcaaaggccctgtggcgggggcaagcttggccttggagcagcaaaaaggaaagtccagtggggctggagcagagcagagcagacctggggagggtacgggccgatggcagcggcaggggccatgtctcaggccttcccggccactgtaagaaatgtggatttaatcctaagggcagtggctgccagtcgaggcctccatggttggtgggagagctgggccttaaaacctggatctcattcttcagagccaaggctcacaggcctgcaactccccttggccttctatgtatcccaagacttcctctgtcaaccctggaacttcctggttatactccgggcatgtgactctgtctcgtccgccttgggctgtcaagtgactcccacagccctgatttcccacaaactcactcagcatcaatctcctctcacacacaggcagatattctcctcggcttctgcaggtcacactctctgggagccttgccccagcaaatgaatttgcatctgcccccaatcctcaacagcagcagaaattggggatggggaaaaggagagaacagagagacctttcaggagcgaatcagtctgcaaactggataggaaggcagagagaacacaggccagacccaacctggggagcttatcagctctgtcctggggtgtaggctcccagaggtctgagctgtctcctctggcctcactcctgtgttaagaggtgacagacaggatcccagggtgagtctggctgaaaatagacaggcagcaggggcagccattagtggtcccttgtgaggttctaactctctaccatcaaatcaccatcagaccaccttctttggtgttatctttctttaatgtaggcagctgaagtcctgatattaacaataataattcacttttattgagcacttaatgtgtgctactcactgtactgcgtactttattttatttttattttattttattttattattttatttagagatagggtctagctttgtcaccgaggctggagtggggtggtggaatcatagctcactgcaacctccaactctttggctcaagtgatcctcccatctcagcctcccgagtagctaggactacaggcatgtgccaccctgcccagctcattatttttttaaattttttgtagaggcaagatcttgccatgttgcccaggctgattttgaactcctgacctcaagcgatcctcctgcctcaaactcccaaagtgctaggattacaggtgggagccacagcacttgggccagtactttagaattttaactcatttatacatctatgtcaaacggaaacaaaaagattcttagaaaacttggtgattcctgtgaattttaacaggctggctaccttgtaacaataccagaaacagaaccagtgagtttgtctgccaacactgctttaatacaaacccagtcacccaccccataagtcccacaaaatgccccatgaagattctcccatgtgactattctggagccacccttcaggaagaacttccagacacaaatcagggagcccctgcctcacctcacacctgtcaggatgactactatcaaaaagtaaaacaaaacaaaacaaatatacacagaaaataacaagtgttgggtgaggatgtgggaaaaatttgaacctgtatgcattactggtaggaatgtaaaatggtacagctgctgtagaccacagaatggcagttcctcaaaaaattaaaattaggattaccatatgacccagcaattccacttctgggtatataaccaaaagaatggaaagcaaggtcttgaccgggcatggtagctcatgcctgtaatcccagcactttgggaggccgaggtggacagaccacctgaggtcaggagtttgagaccagcctggccaacatggcgaaaccctgtctctactaaaaatacaaaaattggccaggcatggtggcgcatgcttgtaatcccagctacttaagaggctgaggcaggagaatggcttgaacatgggaggtggaggttgcagtgagctgagattgcaccactgcactccagcctgggcaacagagtgtgactctgtctcaaaaaacaaaaaaaagaaaagaaaagaaaccaaggtcttgaacagatatttgtgcaacagtgttcatagcagcattattcacaatagccaaaagctggaagcaatgcaagtgtccaaccacagatgaatagattaaccaagtgtggcatctacatgcagtgaaatagattccaaccttaaaaatgaaggacattctgatacatgctacaacatgggtgaaccttgaggatattatgctaatgaaacaagccagtcaccaaaagacaaatactatacaattacactgagatgaggtccctagagtagtcaaaatcatagagacagaaggtagaatggcagttgccaggggcagaagggcagaatggggagttgtttaatgggcatggagttcggctttgcaagatgaaaagaattctggagctggacggtggcgaaggttgcacaacaatgtggatgtacttaacgcgtctgaactgtacatttagaaatagttaagatgttacattttatgttatgcgtattttaccacaactaaaaattccttaaaaggccaggtgccacgtctgtaattccagcactttgggaccccgaggcgggtggatcatgaggtcaggagatcgagaccatcctggctaacatggtgaaaccccgtctctaataaaaatgcaaaaaattagccaggtgtggtggcacgtgccagtagcctactcaggaagctgaagcaggagagtcgcttgaacccaggaggtggaggttgcagtgagccgagatcgcaccactgcactctggctgggcgacaaagtgagactctgcctcaaaaaaaaaaaaaaaggccagacgcagtggctcatgtctgcaatcctagcactttgggaggccgaggtgggaggattgcttgagggcaggagtttgaaaccatcctggtcaacatagtcaaaccatgtctctacaaaagaaaataaaagaaaaaaaattgtagtaagaacaaataagatggccctgcctccttcctggggcccagaaagagatctcactttctgacgggaaggaaagggcccccagcagcattgcagtcacacccagctccttctatagatgttaatagcctggagcagatctttgtgaccccaaaataagccatctcagactttcagtgacactctttagccccagaacagcatcacagtgaaaggagaggtcgagagaaatggagctggagttctaacattgactttggggaaccttaaacaattcactccacctccctggacctcagtttcccaatctttccaagtgaggaggctggacttcgcaagttgtccaggaattatatctgaccccagacatgtcttgttcggccatcacaagatttaaaagctgagagatatcccattagaaggtccggccacccgggggctatgtttttccgaggtcaccatagtctggaagtgcactgtctggaagggttcccccttggatggggctagtgctcctcagttccacccctgccacaggcacaaaacttccctgccaggaccttgcaggcagctgagtttgcaaagcctggacaaaatgacagtggagggacctcacacttcagtgacagctggttcagggttttgtgggtgaagatttcttctaaaacacaatttaggggttttccatcatgggacacactatctctgagactctccttttttaactccaaccctggattcctcggaccagtttcccaaatagggggacctcacaagaggctctgcaagccccactggcaccccacaacttgactccctctcaatttgttgggattcccagcaggaaaggaagtctccaggcctgcttgcggggcttccaaacaataacctccctcttgcctcccctcgaaaaatagagaaaatgaaaaagcaggccaggcgcggtggctcacacctgtaatcccagcactgcaagaggctaaggtgggcagatcacctgaggtcaggagtttgagaccagcctgaccaacatggcaaaaccctgtctctactaaaaatacaaaagttagacaagcttggtggcacacacctgtagtcccagctactctggaggctgaggcagtagaattgcttgaacccaggaggcgaggttccagtgagccgagactgccccactgcactctggcctgggcgacagagcgagactctgtctcaacaaaagaaaaaataaaataaaataaaaaagcaaaaaccaaaaaggctcttattaaaacgattcttcatgacaacccagacaggaaagacaggaactgacatcatcatcccttgaactcctcctcaccataatttgatactaataaaggatagcttttattgagcatttactgtgtgccatgccttcttctaagcaccatgcatattatttcattgaatcctcataacaatccaaggagataggcactattataacccattttacagagaagaaaactgaggcagaacctgcacattggtggtgagaaggcctgtaaaagactttagctttctcatctctcatcacgtgaccttggacaagccacttcccctctccaggcttcaatctctaagttgtacaaggtgatcattctggtctaaacagtttgttactccttgaactcttttactaaaaatcaaagcacacattaaaaaaaaagaatgaaaaattggaaacaacactgcctgtatagggggtatatgtgtgtgtttgaagagccaactagtgaaactttaaaagctaaaaaagcctaaaaaaaaaaatatatatatatatatatatatactaataaacgttattttttttttttggagacagggcctcactgtgttgcccaggctggagcacagtggtgcaatcacagctcactgcagcctcaaacttctaggctcaaacgatcctcccacctcagcctcctgagtagcagctgggactataggcatacaccaccacatccaactcattttttattttttctttgtagagatggggtcacaccaggttgcctgggctgatctcaaactcctgacctcaagtgatcctcccacctcagcctcccaaagtgctaggattataggcgtaagccactgtgcttagcctagactttattttttcagagaattttatgtttacagaaaaattgaaaggaaagtacagagagttcccttatactccctctctccctcccctacttttccccattattaacaccttgtattagtgcagtacatttgttacaattgatgagctgatatgggtacattattattaactaaggcccatagtttatattagagttgactgtgttatgcagtctgcaggtcttggcaaatgtatgacatgcatccaccattaccttattaggtagaatagtttcactgccctaaaattctcctgtgcttcaccttttcatccctccccgctccttctccacaaacccctggcaaccacagttttgtggggtttttttgttttttttttttctttctctatagttttggtttatccagaatgtcatatagttggagccatatggtgtgtagacttttcatattgtctttttttttttttttttttttgacacagtctcgctctgtcgcccaggctgggatgcagtggcatgatcttggctcactgcagcctccgcctcccaggttcaagtcattctcctacctcagcctcctgagtagctgggactacaggcacacaccaccacgcctggctaatttttgtatttttagtagagatggggttttcttggccaggctggtctcaaactcctgacctcaggtgatctgcctgccttggcttcccaaagtgctgagattacaggcatgagccactgtgcccagcccatattgtcttatttcacttagcaatacacatttaagattcttccatgtcttttcatggcttgatagatctttttttctaatcaatgaataatattcctttgtctggacgtgccacagtttgctttttcattcaactattgaaggatatcttgattgcttccacgttttggcaattatgaacaaaggcttatacattttttatagtttttcttgccattggaaaaagcaatgacacatgatcactgcagattaggaaaatacaagaggacgcagagaatgaaatttcgatctttcatttcacaaagaaagaaactgaggctaagggagaggaaatgacaagttctccttgttcattcattcatgccttcacttattcctccagtgaatatttacagaggacctattatgttcaggcactgtgctgggacaggagacaccactgggaacaagagagatgtccgttactggggttaatattccagacagacaataaccaagtaaataaatgaatcatatttgtaacgaaatcacagctaatatttattgtgtgctttctttgtgccaaatgttgttcaaaaaactttgtgtactttatgacatttggtcttcacaagcacactgggaagtaagcctgttatctcaattttgcagatgagaaaagtatagttcagagaggtgaaatcatgaacctgaggtcacatcgctcatcgaagtcaggggagcaagatttaaacccaggtcatggctctcccgtctatgcacttaaccactgctctaaaatatgggaagatcatttcagatggagggttagggacagagcccagctgaaccctgaccttcaccttcttacgcctttgtgtcgggcactttgtttttcatggttctgagaagccaaacttcattgttcttcgtgggttcttccagttgcttagctgtggtccctgtggaccagggggaagggcttggagctcatggctggccagggccctgtgtgcaatcagatcacctttatttttaagccattaaatccctggtgacacatgctgctcttcagaggagcaggctgacctgaccaggagaacagagtcactgggcagggagaagccacacacctcaggcaaagtttttgacaatcaggcaaggaggcagggttggggggggtcttacccaaccctgcttcctgtgggatcattcaaatcagtagcagaaaaagccataagcttataaaatggtactggggagtctctgggggaaacaggtactcccatacacccctggggagtggaaggtgccagagcagttttctaaaacaattgtcatcaactaccaagttttacaggaacacagcctttggccagcagtttcaggtctaggggttcatcgtacagatatcttcgcacatgtgtaaaatgaagtatgtgcaatgctacgcttgacagaaatttgtagaaagaactggaatgacccctttcttctcctaccccccacacaggtccctggttaaagaaaccaggtccgtgcttgcaaagaaatctttggcagctgttcaaaggaagacgggtctccatgtattgcaattgagccctcttcagcataaactgttaagggtgaaaaagaaaggttcagaacattatatgctatcctgattgttacaaaagaaacaaaaagaggtgggcaggggctctgtctatagaggtgttgaactgggagttcctccacaagagcttttagcatcctgaggcctggcatcccagtattggccctcccttgctgtgcaatgaagatcgaagtttcaacctctctgtgctccagtttccttaactgtaaaattggacttgttggaaaaattaaataaagtcatctacacaagaggcatttctcaatgcctaggacgtaggaaatggtcaataaggaacagctgtataataattattgtgcacaaactctccctggaagaaggcacaaaaacatggataatgggctattacctctgggcactgggaaaactgggagacgggacaaggggtgaccaatttttcagtgtatgcccttttcgaagtgttaaactttttttttttttttttgagacaggatctcactctgttgccctgctggagtgcaatggtgagatcgtaactcactaaagcctcaacttcctcggctcaagcaatcctctcacctcagcctcctgagaagctgggactacaagtgtgtgccaccatacctggctaattattaaagtttttgtagagacaagatcttctccttgtgttgcccaggctggtctcaaactcctggcctcaagggatcctctggctaaacttttaattttttactttgtgcatgttttaatgttttttaaaaaatattatttaaaatagggtagcaggtccaaatcaaaatgagaaggagcaggtaagcgattttcaggccattttccagatggattttttgagctaacagcaacctgggtcctgtggctcaaggcctggctgctcatgggcattgtctgggaaactgttagaaatgcagaactccagcccaggaccactggagcagaatgtgtgttaacaagctgtccaggtgagccacaggcaggcgcaagttggagaggcagtggtctgaggactgcagtcatagaggacaccaaagtttctcagttttttgactcagctcagccagaggataaatgggatgggttgcccctcccatggggcgagggttggggagaagagagaacagcaagaattaagaactgcttggccaggcacagtggctcacacctgtaatcctagcactttggaaggcagaggtgggcgggtcgcttgagtctgggcgctagagaccagcctgggcaacatggcaaaaatccatctctacccccaaaaatataaaattagccaagtatggtggcacttgcctatggtcctagctacttaggaggctaaggtgggaggatcacttgagcctgggaggtggaggttgcagttagccgagatcaccccactgcactccagcctgggaaacagagggagatcctatctcaaaaaaaaagaatcgcttgctcttcctccataagaggttgtagcacatgagttctaaggtgtgtgacttttagcagctccccacttagggtttaaaataactttctggttgaaattttaaaaaaggaaagtaaggaaggaagaaaagggaacctcccactgcagcccacacaaccccaacaagaaaaggaggcctcctgctccccagcccagcctcaagcccacttaatctctctttggagacaggaacagaggaattgttcaaggagaaatcaagtgggaagctcttggagctgaagagcctgcaagccaatccacttcaagtttctcatgtaacaggtgggaaaatagaggcttggagaggggacatggtttgtccaaggccacccagcaagttaggggcagaagcagtgccagaatcatagaggcaggagagaccttgaaagcacctaccccagagttacaccttcgagggccccccagggaatgtctagaagaggcacagatcagctattccctctccactggccacaggccaggcacctgagccaagctgggcggatgagaatccatcctagaacttttgttggtcaaaggagtcatccatctttgcatctctccacaggtgtagagtctgccactttttaaaaataattgtatataaaattagctgggtgtggtggcatgcacctgtaatcccagttacttgagaggctgaggcaggagaatcgcttgagaggctgaggcaggagaatcgcttgagaggctgaggcaggagaatcacttgaaccggggaggtggaggttgcagtgagccaagattgtgccactgcactcctgcctgggtgacagagtgagactctgtctcaaacaaacaaacaaacaaataaataaataaaacaattgtgtacaatacacataacctaaaatttaccatcttaaccttttttttttttttttcctgtacagatggagtctcaccatattgcccaggctggtctggaagtccttgcctcaagtgatcctaccaccttggcctcccaaagtgctgggattgcaggcgtgagccactgtgccactcattaacctgtttgaagtgtacagtttagtagtgttcagtacattctcactgtcatgcaacaaatttgctacttttgacagacatgaatataagtttcttgaaacacttcttatactcctgtctaagaaaaacaacagtgaacaaagtgataaatggtaacagacactggtgcttggagccagggagacaagagggagtggtggaagctatggcaaacaggaaaacccaaaccccttctaggagacagtcactaatcagctccaatctgcttttgcctgcaggaatgctacatcatctatacaggaaaacacttaattttttttttttgagacagagtttcgctcttgttacccaagctggagtgcaatggcatgatctcggctcactgcaacctccgcctcccaggttcaagtgattctcctgcctcagcctccaaatccaaagtagctgggattacaggtgtgtgtcaccacacctagctaattttttgtgtgtatttttagtagagacagggtttcaacatgttggtcaggctggtctcaaactcctgacctcaagtgatccaactgcctcagcctcccaaagtaagaaaaacctgatttttttaacttttcttttcaaaactcaaaattcaaaacagttgaaaaggtacagaaaatgtctccctcctactacagtttcccactccacaggtaaccacaattactgatttattgtggataaagtgtctttataattatacaaacaaatagtaacataaacataccttttttccgtgttttatcccattttacataaaagagagcataacaaacacattgttttacaccgtgctttttaattaaataatctatcctaaagaatctttttttttcttttttttctttgagacagagttttgcgctatcacccaggctggagtgcagtggcacaaacagagctcattgcagcctcgacctcttgggttcaagcaatcctctcacctcagcctcccaagtagctgggactacaggcacgtgccaccatgcctggctaatttttttatttgtagagatgggggtctcactatgtcactcaggctggtctcaaactgctgggctcaagtgatcctcctgccttgacctcctaaaatgctggaattacaggtgtgagccaccatacccagccaagaatcttctttattagtacatagactatatgtatcctcattatttttacagttgcacagctgtattccaccatacggatgatctatttttttgcagtgtttttttgttttgttttgtttttgttgttttgtttttttttttagacggggtctcactctgttgcccaggctggagtgcagtggtgtgattatggctcattgcagtctcaaactcctgggctcaagctgtcctcctgctttggcctcccaaagtgctgggattacaggcatgagctaccttgactggttggatgacccatatttgatttaacccacccccatttagattgtttttctagactgttgcattttaaacaatgctgcataggtattgatagtgctgagcactatttacaatagcaaaggcatggaaccaacccaaatgtccatcaatgatagataggataaagaaaaggtggtacatatacaccatggaatactatgcagccataaaaaagaataagatcatgtcctttgcagggacatggatgaagctggaagctatcatcctcagcaaagtaacacaggaacagaaaaccaaacactgcatgttctcactcataagtgggagttgaacaacaagaacacatggatacaggaggggaacaacacataccagggccttttgggagttgcagggtaagcggggagagagcattaggacaaacacctaatgcacgctgggcttaaaacctaaatgacaggttgataggtgcagcaaaccaccatggcacatgtatacctatgtaacaaacctgcaaactctgcacatgtatcccagaacttaacgtaaaattaaaaagtaaaataaaataaacaatgctgcctgaataacctcctacatatatatttttcacatatgcaaatgtatctgtaactaaattctccaaattagaatttctgtatgtgcatttctaatatgtaaggaatttgcctacttgtcccctcatagtggttgtaccaagatccattcctgcagccatgtatgagggactatttttttcacaattacacaccttattgttttaatactgatttaaaaaactaaaacaaaacaaaataaaaataatgtgcgatacaaacaaacatgccagtgggccacatcaagccagcaggccccaactttcccaactccaactcttcaaagcccagaatgttgagtgactcgcctcaagttgcccaggacttgaatctgcactgtctgatttctatggctgcacctgatccgcttcccagctgactactaacttctgggatccctcaactttggcagtgagaaactgtggcttctgcaaagtcacgtggagcctttgtccgttcaaaaagttgaaaaagttccaatcttacttgagggtggtgactgtggatggggctgccccacatccaccaagtgccctgctctcagatgtcagcttgtgttgtgtaacaaccaaccgtaaaaatcatatttaggcagggcacagtggctcacgcctgtaatcccagcactttgggaggccaaagcaggcaggtcacttgaggtcaggaattcgagacctacctgggtaacatggcaaaaccctgtctctactatgaaaaatacaaaaattagctgggtgcagtggcaggtgcctgtaatcccagctactcaagagactgaagcatgataatcacttgaacccgggaggcagaggttgcaacaagatgagattgtggcactgcactccagcctgggcaacagagtgagactccatctcaaaaaaaaaaaaaaaaaaaaaaaaaaaaccatatttacttctgttcttttatccaagtgcttgaggaagcttaggattcagacagacttggagcgtcagtcctggctcaacctcctgcaagctgtatgattttgggtaatttacttgtccctcctaagcttcagttttcttaactataatatggagataataatagtctatattgtgaattgtgcttggtaatcacaccagacacaaaatatatacctttaaacattagagtcaggtccagctcaccaaaatactcaggctatgaaaggctgacaagattcagggcacctcggccgggcgtggtggttcacgcctgtaatcccagcactttgggaggccaaagcaggcaggtcacttgaggtcaggaattcgagacctacctgggtaacatggcaaaaccctgtctctactatgaaaaatacaaaaattagctgggtgcagtggcaggtgcctgtaatcccagctactcaagagactgaagcatgataatcacttgaacccgggaggcagaggttgcaacaagatgagattgtggcactgcactccagcctgggcaacagagtgagactccatctcaaaaaaaaaaaaaaaaaaaaaaaaaaaaccatatttacttctgttcttttatccaagtgcttgaggaagcttaggattcagacagacttggagcgtcagtcctggctcaacctcctgcaagctgtatgattttgggtaatttacttgtccctcctaagcttcagttttcttaactataatatggagataataatagtctatattgtgaattgtgcttggtaatcacaccagacacaaaatatatacctttaaacattagagtcaggtccagctcaccaaaatactcaggctatgaaaggctgacaagattcagggcacctcggccgggcgtggtggttcacgcctgtaatcccagcactttgggaggctgaggcgggcggatcacgaggtcaggagatcgagaccatcctggctaacatggtgaaaccccgtctctactaaaaatacaaaaaactagccgggcgtggtggcgggcacctgtagtcccagctactcgggaggctgaggcaggagaatggcgtgaacctgggagacggagcttgcagtgagccgagatcatgccactgcactccagcctgggtggcagagcaagactctgtctcaaaaaaaaaaaaaaaaagattcagggtacctctctcacttgttctcctccgtgacataccttcactgagacaagagcagtgggcagaatcatccacatgcgtcacaccatgttgtggttttttttcactgagcacatagagttggatacgtataagttgaatatacatgtaaagcaattcctttctatatttgcagtgtttgtgcaactagattgtacactccttgaaggaaggaattgtcttccagttggcaagacaggcttgagatcaactaagtattttacaagacagaacaagataagtggccgggatcggcagctcatgcctgtaatctcagcacttggggaggccgaggcaggcagatcactagaggtcaggagttcaagagcagcctggctaacatggtgaaaccccatctatactaaaaaatataaaaaattagccgggtatggtgccaggcacctgtaattccaactattcaggaggctgaggcaggagaatcacttgaatctgggaggcagaggttgcagtgagccgagatcgtgtcattgcactccagcctgggcaacagagcgagactctgtctcaataaacaaataaataaataaataaataacaaaataagcaatgggtacaaagtgccatgaggaaggacaacctgttcaaacagagccccggaagtatttccggaggctcctgagtcagccctttcaggagggtaagaggatgaaagaggaagtaacatttactcaacagcaatttgctgggcactctgtttcctgattttatttttttctgtttaattttttttctcttttcaaaataacaccatgtaccagtcagctttggctacataacaaactctcatttatttcttgctcatggatctgtggattttctgaggagatgctgttggtctcatgagctcagctgggcctctggccattggactcagctctgatctaccctgcgtgtcactcatcctttgggacttgtgggctactcagggcatgttctcagtatcatgaaagccaggcacacaagggaaaagttcacctccactgtacatttcaaacctttgtttggttcatgtccactgccatctcagtggccaaagcaagtcacatggccaagactaaagatgagatggagaagtccattcattccagggaaatggaagaggaaaagggaaatgtttgctctacggcagtctaatctacagcaacaagtaatacaggagtgcagtcttattaaaaattcaagcaagaggccgggtgcagtggctcactcctgtaatcccagcactttgggaggccaagacgggcaggtcacctgaggtcaggagttcaagaccggcctggccaacatggtgaaacccagtctctagtaaaaatacaaaaaaaaaaaaaaaaaaaagccggtatggtggcgggcgcctataatcccagctacttgggaggctgaggcaggagaatagcttgaaccctggaggtggaggttgcagtgagctgagattgtgccacttcactctagcctggatgacaatagcgagactctgtctcaaaaaaaataaataaataaaaattaaaaaaataaaaattcaagcaagaaaatataaaagcacaacaacagcggaaaatacgtcaccatgctcctcatcccaccatcttccccctactccctagaggtaaacacttttcccaggcgtttacacacagagaaagctattttgcccccttggtgccgagacagtcttgctctgtcacccaggctggattacagtggggcaatcgcagcccactgcagcctctacctcctgggctcaagcaatcctcccatctcagcctcccgagtagctgggactacaggcatgctaccacacccaggtcagaaacgtttacttaatacaatgagatcattctacatgtatttgtacctgacaattataagcatctagtcatgtaattattatatggactctacaattaggcatttggggtcaccattttataaatgaggaatctggggttaaaatgcttatccaagatcacccacctcttacatagctgaaccagaattcgaacccacgactttccaaaaattcttttgatttacagtgagctgcctctataaaagcacaagaggttgcaccacaaaacctgttgttatcagccccctacatttatcctttgggaccacagaggaggggtgtccgtgtgtgtgtgtgtgtgtgtgtgtgtgtgtgtgtgtgtgtgtgtgtgtagggggtgggtggtgtcgtgtgatttaggagagtgttcactatgactagcgttgtggcgggagtttgggagacatgatgaagaggaggaaagaccttcaccctcaggtcacttacaattaagccaaagaaaccaggagcctctcttgaagcagtttaataagatggcaggatgtggccaggcatggtggctcccacctgtaatcccagcactttgggaggctaaggcaggcagatgacttgaggtcaggagtttgagaccagcctgaccaacatggtaaaacccggtctctactaaaaatacaaaaattagctgggcatggtgacacacggctatagtcccagctacgggggaggctgaggcaggaggatcacttgaacccaggaggtggaggttgtagtgagccgagatcacaccactgcactccaccctgggcaacgggagtgaaactgtgtctcaaaaaaaaaaaaagaaagaaaagaaaagatggtgggatgtgctagtgtaagccttgggtacccatggggagttttattatctgtctgtctcaaagctgtcccttgacagagagctcagccagaagctagtatccctgatcagagtttggggaggacacaggtcttagccatcttcccagaaaatgggtaagactgagcgaaaggagaaagaacgtactctcacatgaagtgggaacagtgacaaatactacagtcttcagcagcatccggtgtgacatgagtgtgcgctcagggggcttcattcagactgggtgtcagggaaggtttcttggggaatgaacattccagccaaaacctgaaggccaagtgggaagcagctgaagaacaagggaagagagatccccgcagagggaacggcgggtgcgaaagcattgaagctggagagggctgggcattgtagacacagaaaggagggcagcagggtaaggatgactgtgaggaggaaaggagaaggctgagcagctggcagacgctgggctgtgcagggacttgagctaagctgtttagggaaaggtgtgacatgaccacaagctggtgccagagtgaccacagaagagtggcttcctgggcatctaagagggcacagtcagggcggtaagtggcttagaagcagggccgcgatcagtattgtgtacgttgtgtgatgactctggaggggactgaatctgggtatgcagctaaacattcaagttctcaaaagcgtgtttcaaatagcaaaactggagaagccctttaatggagtttgaaaaaggcacaggagagaagtctgacgtgtttcagtgcagggtaagggaagaagtggggagggattgggtttggagggtgtcacgaggcgacaggtgagccgaacaaataggacattgctaagcaaggctgggaagaaagggacgacgggcagaaggcacagcaaaggccaaggcggggtgtttggaacatgcccagctggtgtggagaagagactgggaaggattcaagctcaggctcctggaggagaaaggcataggggaatgctggaccgttcacctgggggttggttatgcagagcctccgatgcctgacatgggaacgagggagtggcctgatcagatggttcgtaataacttggcagattcacctcctgtgctctctcaccccaagggacttgagtgagtcattggggcccttcctcctctccctccacacaaacacacgacttttggggaggccaaggtggcagatgggggtgatagatcctgtaatcctatccccagtccaggggtcaggaagttctttccccagcaggctcccacccaagactgctgttaagactgaggttggagaagtgtttttctcatccacccagcctcaggtgggcaggacgggagccaaccagagccctctggagacagttctgtctgtgggatccgccctttggaggacacaaatgaaacccaatgcaacataaaagatggcaagaggtggccaagtgcttatcttatcaaacaaactgctccttggaaccaaagaaagggaatagagctttgcttgttttctctttttatcttcctgattaattgccagcaaggggtctgtgggatgggtggtggttgagggcgactcttggatgtgtgatctcgcctgggaggcaggtaggtttcccagtcaccctggatttttaacattttcttgttggaagtcacatcctcaagcaaactcttaggcactatttagggagcactccccaaacagctccattatggcctaaatattcttgggaagatgaaaaggggaaaagactatcattgctcaaaacaagtctataatctagatggaagcaggtaaagaggcacaatatttaccatcttttatttttacagggtctttatctatttccatcacttaaccatgagctctttgggaaccagaacccagtcagaaccattggggtatctgaatctggacccaagcatgtagtggggctcagtctacctgtcacctcattcaggattctttcagttgtaagtattagcaactcagctcaaaaaggcttcattgaaaagtatgatatataggccgggcgcaatggctcacacctgtgatcccaacactttgggaggctgagacgggtggatcacctgaggtcaggagttcaagaccagcctgaccaacatggtgaaaccccctctctactaaaaatacaaaattagccaggcgtggtgattcacatgcctataatctcagctactcaggaggctgaggcaggagaattgcttgaacccagaaggtggaggttgcagtgagccaagatcgtgccattgcactccagcctggtcaacaagagcgaaactccatctcaaaaaaaaaaaaagaaagaaaaaaaagtatgatatattaactcacggaatagagaaatccaggtctagaatgacttcaggcatggatagatctaggagtcaaagaacatcaccaagatcagactttcttttccctcagcacttttttctgcactctttgtgccagcctcagttagattctaactcagtggtggctctcagtggcaaaatagcttagcaacaccagttgggtttcttttctcccaatagtaatagaaatgcttaaactggctctagctggatcagtgtgggtcacatgctgatctctgatacaatcactgggcagggaaatgggctacactgattggcctggtgtaggccccatgtccatttcatatttgttacattaataaatacgaaagattagagacagcaataaaacattttacatttgaacaatagagcaactagagtgatcctttttaaaacctacaacaaatcatttgactcctctgctctaaaagctcctcactcagaacaaaagcccaagttcttcagaacaaaagcccaagttctgagccaggcgtggtggctcacgcctataatcccagcactttgggaggctgaggcgggcggatcacctgagatcaggagtttgagaccagcctggccaacatggcgaagctccatctctactaaaaatacaaaaattagccgggcatggtggtgtatgcctataatcccagctacttggaaggctgaggcaggataatcgcttgaacccaggaagcggaggttgcagtgagctcagatcacaccactgcactccagcctgggcaacagagtgagactctgtctcacacacaaaaaaagcccaagttcttacaatagcccacaaggccctacccaacatgcaccctgccccaaccccagttattcactgacctcctagtctccccttcgttcactctgctccagccaggctgctctccttgcatagccacaaaaagtatacatgcagtagcctcattttctttgctaataaaatgagacctcttctagtagacacctgatactttgcccagaattcccctttttctttttttttgagatggagtctcactctgttgcctaggctggagtgcagtggcacgatctcggctcactgaaacctccacctccctggttcaaacgattctcctgcctcagcctcccgagtagctgggattacaggcacgtgccaccacacccagttaattttttgtatttttagtagtgatgggtttcactgtgttagccaggatggtcttgatctactgaccttgtgatccatccgcctcagcctcccaaagtgctgggattataggcatgagccaccgcgcccggccacattcccctttttctggcaactctctggcatctgccctaccacaccttccttccatgtgttttaggaagtgttgacctatcccagatccagagatggacgtgtgacttaggcctggccaatcagaacatccaacagcattccagaaccactcatagcatgtggttcagggatgggcatgtgacccaactcaatctaatgagattcaatcctgaacctttattgggatgattagaaatgaaaagctttctgtatgttgatattattagaaggataatggaagtattgaggctcccaagccacccgctggagagaaaactcacttgtgagtaaaatcagtgccagggaaagcagagcggtgaagcaggaagaggaaaactgagttccggtgacatctttgagcccctggattcagccatgcctgaatcccactagacttttcagttacatattgtagtaggtacccttctttgctcaagccattgtgacttgggttgtagtcacttgtaaccaagagaccattttgaagggctgctattgcgaggattaaatgagatggtgaattacatgaagtgtttagtacaatacgtgctccaaaagaaaaagtcattattattttgcagtttcatcttccatacacatatttaaatctgttttcccttttacgttctttacctaagaaaaaaatgtttaaacttatctataatcaaagctggtattcacttgggaccagtgtagttatactggttatttaaatactgaaatacattcataatagttgataaacagtactgttctgaatctcccacatgctctgtggctctccagaatgcacccaactcgtctgttggaatcctctagctcattctactatctagcacctaaaaggttaacaccaggtctagcagggcctcctgtattctgtttatgattagcgtctcattcatgctacatatttttaatatcacctctgggtacatctgtcaactcgtcaatatgcctgcattaaatggaaacactaaattatcaacagctccatgaaataagacccttactcccctccaaatcaccaattattgataactatgtaacctcttctgatcctaaaaatgccagagacataattatgcacagtggtgacaaagcaggcatgggcaccaggccaagtcctatctttccccttcctgttactttacagagcctctacccttatttctacatcatggtcatatttgtcattcctagttgcaatctgatattcctttgttttaatacactatggctggcctaactcttcctccatggtgggacatatggtccatttttgttcagcttttcaaatgttaaaaactcactctgctggaaattgaatttccatgtggtgcccatctttctggtaataagccatggatttccttcctgattcaaacttcagttttgtgaatcacaagacacagtttaactttttgtctgcaaatgttttctgttgctgttctttgaaataagaacccatgtgctcaattgtgtaatgctgtagtttaataaattattcattttgactctaagtccacaaaggactcaaagtggtttatacaaatatatacaccttgaaatcaatacatgaggtggtcaaggagaaggaaaaataaggagtagtatatccgattggtattgtgttcagctgctggtaagagagaccaggaataacagtggcataaacaccacagatgtttatttttctcttacacaaatgaaatctagagagaggaaacccagagctgatgtggtagctccacaaaattgaggatacgatctctttctatcatcctgcctcactatccttagaatgtggcctccatcctaaagtccacctcgtgctgcaggatgactgcaggagctccagctattgcagccacatttcgggcagcaagaagaaggaaatgaaaaaatcctgtaatcccagttttctttaaggatcattttggaagttccagcccaaaacttcagcttacatataattggccagaatgtagtcctagctacaaaggaggctgagaaatgtaatctcttagttgtgcctgatgccaccccaaataaagttcagggcttatttactaggaaagaagggcaaatggataatacataggccactagtcatttctgccacaggtaagaaaatgaaataaagcgagacatttagctggttcacaaaactgcctactataaggacctttaaggtgtccagctgccaaattgtctctgagaatcctagtaatgatagcagaaggggaatctatgactaaatactaagtgtaatatctaagcaaagagagcaaaccattgctaaaaaaaaaaaaaaaaaaaaaaaaaaaagcttcttttctcaatacagagattaaaaagcaactctacccacaggtctttgtgaggaagacatgggacatgtggacgatatcctcacaatatttctgcaataatgaaacaacatgattctgggacttgcttcaaatattcagcgtgggggagtgggtaggagtatagcgaaaaccagatgggccatgagttgataattgttggactgggtgatggagactgctttgttatatgtttccctttactgtggtgtacatttaacatttttccataataaaaaaagaatttaaacccagcaataaatcctttccaacaattgctttttaaaatgctccttttaataaacttgcttttaagttcaattgacaggtggtttttatcataactcctccctcatatttttggcctttgtatctactgtccttatttattaacttatttttaacagttttattgagatagaatttacatacaattcattttttttttttttttgagacagggtctcactctgtcacccaggctggagtgcaatggtacgatctcagctcactacaacctctgccttccgggttcaagggattctcctgcctcagcctcctgagtagctgggtctacaggcacctgccacgacgcccagctaatttttgtacttttagtagagacggggtttcaccctattggccgggctggtctcaaacgcctgactttatgatctgcccaccttgccctcccaaagtgctgggattacaggcgtaagccacagcacctggcctacaattcatctttaagtgtgcaattcaatggtttcttgtagttgtgcaaccatcactacaatctaatttcggaatgttttcatcactctcaaaagaaaccccatccccatctctacccatgctcctttccccacccccacccccagccctagacaactactaatctactttctgtctctatgcactcccctattctgtatatatcatacagatcatcatacaatatgttttttatgacgagcttcttccacttaacatgatgtcttcaagcttcatccatgctacagcatgtatcagttctttataactttttacagctaaagaatattccattattttgatatacattttgtttagacaaccatcaattgatggacatttgcattgcttccaggtttggggtattatgaattatgttgttaagaatcttcatgttgctgggcgcggtggctcacgcctgtaatcccagcactttgggaggcggaggcaggcggatcacgaggtcaggagatcaagaccatcctggctaacacggtgaaaccccgtctctactaaaaatacaaaaaattagccgggtgtggtggcgggcgcctgtagtcccagctactcgggaggttgaggcaggagaatggcgtgaacccaggaggtggagcttgcaatgagccgagatcgcgccactgcactcaagcctgggcaacacagtgagactccgtctcaaaaaaaaaaaaaaaaaaaaaaaaagagagaatcttcatgtttctatgaagtttctatgtgtatgtatatttttgtgtctctggggtatatatacctaggagtagaattgctgggttaaatggcaattctatgcttaatattttgaggaactgccaaactgttttccaaagtggctgtggtatcttacatttttgccagcaatatataaggactgcaacttctccacagcctcactgacacttgttattatctgtcttttattttatcctcactagtgggtgtggactggtatttcattgtggctttaatttgcattttcccagtgataataaatttaatcatcttttcataagcttattggtcatttgtatatcttctttaaaggagtgtctattcaaattctttgtccatccttcagttgggttgtcctttttttttttttttttttagatgaagtcttgctctgtcacccaggctgaagcgcagtgatgcaatcttggcccactgcgacctctcagcctcccgggttcaagcgactctcttgcctcagcctccaggcagctggaattacaggcacatgccaccacgcccagctactttttgtatttttttagtagagacggggtttcaccatgttggccagactggtcttaaactcctgacctcaggtatctgtccaccttggcctcccaaagtgctgggattacaggcatgagacaccgtgcctggcccattgtcttttcatgatcaaaaccacaaatagaaagggcattgtaaaaaatcccacagctaacatcatacttgatggtgaatgaatgctttccccctaaaattagcaacaagacaagatgtctgctctcattgcatctattaattattgtactggacattctagccagggcaattacataagggggaaaaggcatccagtttagaaaggaagacataaaattttattctactttcagatgtcttgatcctgtatattataaatggcatggaatccactaaaaattgttagaattaataaacaagcttagcaaagctgtgggatataagatcaacatacaaaaatttatctctatgaagtgtcaatgaaaaatcagaaaataaaattaagcaaacaattcattttacaatagcatcaaaaaggataaaatacttaggaataaatttacagaagtacaaaacttatgctgtgaagacttgaaaacactgttgaaatattaaagaagaccgaaataaaaggaaagtcattgcattttcatggactgatagacttaatattatcaatgtagcaatactccccaaactaatctacaggtttaaagcaattcctataaaactcccagctggggccgggcgcagtggctcaggcctgtaatcccagcactttggggggctgaggtgggcagatcacgaggtcagcagatccagaccatcctggctaacacggtgaaaccccgtctctactaaaaatacaaaaaactagccaggcgtggtggtggacgcctgtagtctcagctactcgggaggctgaggcaggagaacggccgtgaactcaggaggcggagcttgcagtgagccgagatcaccactgcactccagcctggacgacagagcaaaactccgtctaaaaaaaaaaaaaaaaaaaatcccagctggtttctttttagttggctgaccctaaaattcatgtggaaatataagcaacccagaacagccaagacaactttgacaaataacaaaattggaaaactcacaattcctgattttaaaacttactataaggtcacaataatcaagacagtgtggcgttggcataaggatagacagataagtcaatggaacagattaagaggacagaaataaacccttacatttatagtcagttgacttattacaatggaaccaaaatagtttgatgtgacaatataatcttttcaataagtggtcacgtgaaaacaatgagtttggactccttcatcacatcatatgcaaacaataactaaaagtggatcacagacctaaggataagaactaaaactataaacttcttagaagaaaacattggaataaatatttgtgactttgggtaaagcaaggccttgttacatatgatgtcaaaaaatataaatgactaaagaaaaacaatagatacattggacttcatcagaattaaacacttgtgtttcaaaggacactatcaagaaagttaaaagacaagcaactgaatgggaggaaatatttgcaaatcatatgtgataaagggcttatatccagaatatctaaagaatacaacccaatagtaaaaagacaaataaaccggcagggcacggtggctcatgcctgtaatcctagcactttgggaggcagaggtggatggatcatttgagatcaggggttcaagaccactacacctggcctaaatcctgggttttaaatctggataatgtccatgcatgaaagagcctgaccacctgtgttggacccccaggtccattatacctagctgtgtgacctcaggcaaattactcaacctctctctgcttttgttatctcatctataaaatggggataaatatagtagtaccacttttagggatgtttgaggagtaaatgagttaacgcatataaagaagagcataataaggagtctaatactagccactatcatcatcatcactataggtcatttggatataacagatacagccctggtacaaacattgtcctgtttcactgtcgtaggtccagcacctaaaagagtgtgtgtggcatattgcaggcgcttaataaatatctcttgaataagtacatgacagcgaatacatgaatgaatggatgaagaaaatatgggtatagtagagctttggtttaaaagtggaagatgacaacaccaaatgctggcaaggatgtggagcaacagaaactctcattcattgctagtagtaatgcaaaatggcacagccacttctgaagacaggttggcagtttcttacaaaactaaacctactcttaccatatgatccagcaatcacactgtttggtatttacccaaaggaattgaaaacgtatttccacacaaaaacctgtacatcatgtttatagcagctttattcatagttgccaaaatcttggaagcaaccaagatgtcctccaataggcaaatggatgaataaactgtgacaccttcagaccagaaactttaaaaacaggggtcgggggtgggggcactatcaagccgtggaaagacatggaggaaacttaaatgcatattactaagcaaaagaagtctttcagtctgaaaggctacatcctgtctgatttcaacgacatgacattctggaaaaggcaaaactatggggactgtaaaaagattagtagttgccaggggttagagaaaagggagagatgaatagttggagcacagaggatttttaaggcagtgaaattgttctgtgtgataccataatggtggatacatgccattatatgtttgtcaaaacccatagaatgtgcaatcccgaaacctaatgtaaactatggactccgggggataatgatgggtgataataatgtgtcaatgtaggttcatcagttgtagcaaatatattattgtggtgcaggatgtcagtagtaggggaggttgtgaatatgtagggatgggggtatgttgaaaatttctacagaaattctattttccactcaattctgctgtgaacttaaaactgctcttaaaagtaaagtttattcattagtgtaagaaattctggaagcctccgtggtaaggccagtcacacgcaggtgctctgatgtaccctagcactggtcatccagagattgggcttctcacttccttctcctggcagtgggccacttgcacagccaaagctaagaacagaagcctggcacacccccaggcgctggccaggccacccttagtgagccaaatacccccaccatggaaccactgctcagctgggtctggccacccagaagcacttacaaactctctgcatctatgtgtgaccagaagcctgatctccccaggcctcatggtggtgtttttaaagaaagcccccagaagctaggcccagacaaaatcagttcccaaagggacaaaggcgctcagtctcacaagttaagtaaaagacaaaaacagaagcaaacatttatatagcattaagcttgtgtctgcactcttcttagcttttacaaacataaattcatttaactttctccacaatcccacaaggtagggactagtattatcaccatgttacggatgaagaaactgaggcacagaaaggctaagtcagtagccataaaaccagtcaatctgttaacatgtcagagctgggtggtgaatccaagcaggctggctccaagaccctgttgatctctctgttgttctcccttccatgtacacagtactttacagtttgcaaaatccctttagcaatatagtatctcatttaagcctcacaaccatcggaggtaggtagggcaggtaatactatctttaagaggaatggcaatgagggaacagcaaatgaggaagctgaagcctagagaaggtaggtgatttgcccaaagttgcatgataaacagcaaaggctctggaggcaggtggcataggttcaaaccccagctattactgatcagcctcataatcttgaacaagttaatacatacctccgtgcctcagtttccccatctttcttagagtttttatgaggattaagcaagtcaatacatggaaagcactttatttaaaatgttggtggccaggagcagtgggtcacacctgtaatcccagcactttgggaggccaaggcatgcggatcactttgagctcaggagtcagagactggtcaacatggaaaacatggcaaaacctggccaacatggttgactcagcctggccaacatgacaaaaccctgtctctacaaaatatacaaaaattagccaggcatagtggctcacacctgtggtcccagctacttgggagactgaggctgaaagacagcttgagcccgggaagcagaggttgcagtgagccaagatcacaccactgcactccagcctgggcgacagagtgagaccccaactcaaaataataaataaacaaataaataaataaaaataaaatgttgtttgccgggtgcggtgattcacgcctgtaatcccagcactttgggaggccgaggtgggcggatcacgatgtcaagagatggagaccatcctggctaacacagcgaaaccccgtctctactaaaaatactaaaacaaaattagccgggcgtggtggcgggctcctgtagttccagttcctggggaggctgaggcgggagaatggcgtaaacccgggaggcggagcttgcagtgagccgagatcacgccgccgcactccagcctgggcgacagagtgagattccgtctcaaaaaaataaattaaataaataaataaataaataataaaatgctggtattttgggccaagcactgtgggtcacacctgttgtattaggttttcacactgctgctaaagacacccgaaactgggaacaaaaagaggtttaattggacttacagttccacatgtctggggaatttctcagaatcattgtgcagggcgaaaagcacttcttacatggtggccgcaagaaagaatgagggaagaagcaaaagcagaaacccctgataaacccatcagatctcgtgagacttattcactatcacgagaatagcacgggaaagactggcccccatgattcaattacctccctctgggtctctcccacaacacgtgggaattctgggagatacaattcaagttgagatttgggttgggacacagtcaaaccatatcacactgtaatccgaacactttgggaggctaaggcaggtggataacttgagtccaggagtttgagaccagcctggacaacatagtgaaaccccatcgctactaaaaaaatacaaaaattagctggccgtggtggtgcactcagctactcgggaggctgaggtaggagaattgcttgaacctgggaggtggaggttgcagtgagccaagatcgcagcactgcactccagcctggcgacagagcgagactccaactcaaaaaaaaaaaaaaaaaaaaaaattagccaagcatggtggcacatgcttgtaatctcaactacttgggaggttgaggtgggaggatctcttgagcccaggaggcagaggttgaagtgggccgagattgcaccaccacactccagcctgggcagcagagcaatatcctgtctaaaaaaaaaaaaaaaaaaaaaaagccattttgtttgtcatggatttttgtattcatttcgattttggtaaatattgcattacaaatactttatcttaattaccaagtttgttaacgctcccttaaattttgtctggcttgcttcaccctagtcctggccctgctttgcatgggggaatcctttaatacacactagctagtgtcatcccactacttgttgaatgctaactatatgccaagaattgctgttagaagttttataagtatacatcacctcaacaacaagaagaagaaaaatcagaaaccaagttgaaaagcaagtgacaggacaggagaaaatatctgtagtttatacaggcaaaagattggtgctcaaaatatataaagaactactacagattcatttttaaaaagacaaactacccaatacaacagcaggcaaaggacagaaatgggcagttcaccaaagaggaaaaacagatggtcagtaaacatatgaaaaaaactttagcctcactggttatgaaatacacatttggaagtgtgatgttatcaagggttgggaagagtgtaaggaaatgggattataaactgattataaactgatatagcctttttggagggaaattcaggatctctattaaagtgaaattgcatacacccactgactgagctatttcacttttgtctgcgccagagaaacacgtacacatgtgcatgaggatatttatcaaaactttgctctgaatggcagtaagttggaaacaccctaaatgcccctcaaaaagggaactgatcaataaaccacagtatagtcattctatgaagtagaagctacagggtttatttttaaggtagatcatgctattaattttggggtgcaaaagcaagtggtagagccatatgcactgtatgttgccacttgtgcttgcaaaaacaaccaggaaaaaaacagtactgaagaagttctcattggccgactatccaacagtcattgccttcttctttgctaataatctccaactttgtctgggtggcaccgtgccccatgccagggaaggaaccaccttttgtctcagccaaccttagcagtccttctcctatctgggagcccagtccaggccaggagcagcatctcccatcattagcccgggtctacagaggccagctcccacccctgaaattgtcacccacacatgtcttaagggtttggaaaatagagcatcttctgggctctttggcagaatggacttgccgggtgggttttttcacttcattcctgcaggcctgcctctctaggtctttgcttccttcctccatgggcttcaggggcagatctgacgtttctaccacacttggtctgcaccagcgtttttccaagctgccctcctgggagcatgtgagcatcatctcctggggaaatgccagggtgtttgagcctgtatcccaggacagtgctcctgaatgataaactctcccttatccaataccatatttcctccctgcactcctacccctccatccgaaaccttctggatccatttcctccacaatctcaagctcccatcagcacttatgacacaaattctggagcccctttggtgccaaatccctcagcatcccagaatatctaccagttgggctgtgcgggaaattgactcttgttattggtctggtggccagcaagggagaaatagatcattcttgttggttggttctccatctcctggaagtgttcaagagagattggaagggtccttggcaggtgatgttgactccagcctctgcaatcacatagccctaggttctagtcccagctcaagcatttcctagctgtgtgcctgtgggaattcacttaacctttgtaagcctctgtctccacctctgtaaagggcaggaaataacagcatgagccttgcagtgttgttgcaaggattaattgagatggcatcttcaaagctccctgcagagggcctgcctggctggctaagccacttggataggcccttcccaacaaacttgagattctataaataagaagaaatgtggctgggcacagtggctcatgcttgtaatcccagcactttgggaggctgaggtgggcggatcacttgaggtcaggagttcgagaccagcctggccaacatgaagaaaccctgtctctactaaaaatacaaaaattagccaggcgtggtagcatgtggctgtaatcccagctattcagaaggctgaggcaggagaatcgcttgaacccgggaggtggaggtttcagtgagccgagatcatgccactgcactccagcctgggtgacagtgaaactgtgtctcaaaaaaagaagaataagaagaaggagaaggagaagaaggagaaggaagaagaaggaagaataaagaagaagaacaggaagaggaaggagaaggagaagaagaagacaaagaggaagaggaagaggaaggagaaggaggagaaggagaagaggaagaagaggaagaaaaagaggaaaaagaagaggaagaggaagaagaagaaaagaagaagaagaacaagaacaagaagaaggggaagaagaagaagaagaagaagaggaagaggaagaagaagaggaagaggaaggagaaggaggagaaggagaagaagaggaagaagaggaagaagaagaggaaaaagaagaggaaaaagaagaggaagaggaagaagaagaaaagaagaagaagaacaagaacaagaacaagaagaaggggaagaagaagaagaagaggaagaggaagaggaagaagaagaagaagaagaggaagaagaagaagaggaagaggaagaagaagaggaagaatgcttcctagaaccagttgggaattgaaagcagtatctggagttgggtgagaagaagaagggacttgaaggggcaaaggaaactcaagctttgttcagctgcagttgtcaagtgtgctgggctctccccagggaagacacccacctgctggggatgacacaccttgccgggaaaacaaggtgctggtgtgtgcagtggtacagggcactgaaaagaacgtggcctaggacacggacagacctggctggcttgagccccttatgagcctcaggcttggagcaagtctctgaagcacaacttctcagccattgctctatggacagtgacagccagatcactctttgcagtgggggctgtcctgggtattgtaggatgtttagcagtatgcaccgtctctacccactaggtgccaggagcagctcctccccccaagttgtgacaactaaaaaaatgtctccattgacattgtcgacattgccaagtgtccccaggggcacaaaatcatccccagttgagaactacagctttaaatctaattaagccttcctggtcaaattgggataacagtgatagtaatactgccttgtatggtggctgtgaggatttccttccttccctccttccttccttccttccttccttccttccttccttccttccttttctctttctttctttacttttagagacagggtctcactttgttacccaggctggagtgcagtagtgcaatcatggctcactgcaccctcgacctcctgggttcaaacgatcctcctgcttcaccctcctaaatagctgagactacaagcatgtgccaccatgcccagctaattttaaaaaatttttttgtggagatgagggtctcgctatgttgcccagcgtggtctcgaactcctagcctcaatccatcctcctgcctcagcctcccaaagccccgggattacaggtgtgagcccctgtacctagccagggcatttcttgagcatttactagatgccagtggctgtgctcatgctttcatgcatcagctcccctcctcccatagcccatcccacatggtgcttttaccctcatcctccctacatagatgaagaaactgtaaacatctttcttttcatcacattcacattcaaccaatacctcccaaggaagggcctcttatgtgccaggattctgggagggattgtggcacatatgtaatctcactggtttctgggtgggtttggctagttgagaaccactcacagtagaccgaagggtgaaaggaggggagaatccaggatattttctctcgttctctctctctgtgcctccaaagcatcatcagcagctgctgtgcctcatctgtggctgcagatccagctgtacagtctgtcccttggtgatcctggatctagctgggcaggccatcaggattctgtctcctgccaggtggcccagcttcaacttcacagcatggtagcaccaactgttctctgctcctcccccaacaaagatggcatcatcttcctgctatggtttagcactgagttgtctaacatgccatttggcttctcacttctatcatctgtgtgaccaattccttgtattatattccctctatttgaatacctagtgggatttctgcttctctgattggtctctgacggctccatatgagatttggtttcctagttcatgctcttggacaccacaataatcagctctttgctgtacatggagtatatctcctgaatataaagataaatgtgtttgatagatgtattagtcaggactcttttgattgcaagtgacagaaaaccagccttaattggtttaagcagaagaagggaatttattggcttatgtaactgaaaagtccaggggatgtttggcttcaggtacagtttgatccagcaactgcaatgctgttgtcagtatgtctccatctctagctcttctttcctctgtgttgacctcatgcttaggcaagctcttccactaaggtgacagacaatggtttcagcatcaacaaacctacacccttcaagtttaccaacttcagtagaaagtcctctttctcaatatttccagctgaagtcccaggcaggattctcattggtccagcttggaacacatgcctgtttctgagccaattactgtgacaaggcaagatactgggttatacatcgaacccctgcagctggacagtggggtcagcatcccccaaaccacaaagtccaagaatgggagtgaggtggttcctgagaatagtgaaggggtgttgttaccaaacatcaatgcatgtgcactgatagatacatgttatttggtttactcgatggtgatgccgagctaaccagcagatcaggaggagcagaagattagcaatcagaagacccatgtttgagctcagggtcttcaggcacccttctctgaactgcaattttctcatgcataaaattcaacaaaaaacaataaccggccgggcgcagtggctcacgcctataatcccagcactttgggaggccgagatgggcagatcacgaggtcaggagatcgagaccatcctggctaacatggtgaaaccctgtctctactaaaaatacaaaaaattagccaggcacggtggcgggcgcctgtagtcccagctactcgggaggctgaggccagagaatggcgtgaacccgggaggcggagcttgcagtgagccaaactcacaccactgcactccagcctgggtgacagagcaagactccgtctcaacaacaacaacaaaaataataataataataataatcacaaacattaagtgaatggcaattatataccaggcacttatgtaggctccagaaatacagacgtgaaggaaagaaaaatagagtcaatatcccctgaagtgcacatgtagctgtaagaactacttgagattctttgtgcaaaatgcctcgctgagcccctatcagggcctcagaaggtagtggttgagttgaagtttgaagaaaagagagaaaggcccttataaagtatagactactatggcaaaggctgagaggagtacaccgtggcttttctccgtttctaccttagttaggctcatggttgcctggaattaagactacacgtgactggcctggtgcagcgactcacgcctgtaatcccagcactttgggaggttgaggcgggcggatcacgaggtcaggagatagaggccatactggctaacaaggtgaaaccccgtctctactaaaaataccaaaaaaattaggcgggtgtggtggcaggcgcctgtagtcccagatactcgggaggctgaggcaggagaatggcgtggagccgggagacggagcttgtagtgagccaagatcacaccattgcactccagccctggcgacagagctagactgtctcaaaaaaaaaaaaaaaaaaaaaaaaaaagactacacatgactaagttgtagtcaaggggatgtgtgtgaaaatgtagtatggaggggagctgggagtggagggggcagggagtgttctttttctgtgtgagacggagtcttgctctgttgcccaggctggagtgcggtggtgcaatcatagttcactgcagcctccaattcctggactcaagtgattttcctgcctcagcttcctgagcagttgagactacaggcacacaccaccacaactggctaatttctttaatttttttttttgtacagacagggtctcaccatgttgcccaggctggtttcaagcacttggcctcaagtaatcctcccattttggcctcccaaagcgctgagattaaaggtgtgagccaccacgcccagccaagggggtgttcttaaaggaagaaacgaggcacctaggtgctccttcggcttccctggtacctgaaatgtgcataagatgacagctggcagagcaggcagcttggaccatgaggggttaactactggatcttgcccctcatttctctcatcttttttttcttttttcttttttgagacagagtcttgctctgttgcccaggctggagtgcagtggcacaatcttgactcactgcaacctctgattcctgggttcaagtgattctcctgccccagcctccccagtagctgggattacgtgtatgtaccaccatgcctggctaatttttatatttttagtagagatggggtttcgccatgttgcccaggctggtctcgaactcctggcctcaagtgatccacccatcttggtcccccaaagtgctgggattacagaccttagccaccgcgcccagcctttctctcatctttatgtgaaaaaatgtctcttgacctcatctccagctataactccatctctttccttctctttgcagcaaaactcaaagagtctatatctcaaatttctctcttcttactcacccccgccctgcatgtggctctatcccagggtcacttcaaagtcctcatccatcctggacccctcagcagcatgtgacacagttgctctctctctcctttttcaaaaagtttggtaaaatatacataacataaaattgaccattttaaccagtggtattaagggtacagttccaatgagaagagttggacacagggcggggaacatcacacaccggggcctgttgtggggtggggggatgggggagggatagcattaggagaaatacttaatgtaaatgacgagttaatgggtgcagcaaaccaacatggcacatgtatacatatgtaacaaacctgcatgttgtgcacatgtaccctataacttaaggtatataaaaaattatctgataaataactttaaaaaagggtacagttctgaagcattaagtacatttgcactgttttacaactgtcaccaacatccacctccaaaacttttttgtctcctcaaattgaaaatttgcatccaagccaagcacagtggctcacacctgtaatcccagctactcgggaggccaatgcaggaggatcacttgagtccaggagtttgagattagcttgggcaacatagcaagactccatttctacaaagaattgaaaaattagccagacattgtagtgtgcacccgtagtcccagctactcaggaggctagagcaggaggatgacttgagcccaggagttcgaggctgcagtgagctatgctcatgccaccacactccagcttgggagacagagtgaagcactgtctccaaaagaaaaaaaaaaaaaaaggaggccaagcatggtggctcacacctgtaatcccagcattttgggaggcctaggtggcagatcacctgaggtcaggagttcaagaccagcctggccaacatggtgaaaccctgtctctactaaaaagacaataattagccaggtgtggtggcgggcacctgtaatcccagctactcaggaggctgaggcaagagaatcgcttgaatctgggaggtggaggttgcagtgagccaagatcatgccactgcactccagcctggtgacagagtgagactccgtgaagaaagaaagaaagaaagaaagaaggaaagaaagaaagaaagaaagaaagaaagaaagaaagaaagaaagaaagaaagaaagaaagaaagaaagaaaggaaagaaagaaaggaaagaaagaaagaaagaaagaaagaaagaaagaaagaaagaaagaaaggaaagaaagaaagaaagaaaaaaaaaaaaaagaaagaaattctgcattcactcccaattctttccaccccaccccctccagaccctggtaacctctaatctattttctgtctcaatgaatgtgcagattctagatatttcaaaaagtagaatcatgtaatatttgtcctttgagtctagcttctttcatgcaccattatgtttttgagactcacccaggttgtagcatgtgtcatacttcattcctttatgtctgaatcatattccattgtagggatagaccacatttgtttatgcatttatccactgatggacatgtgagctctctccactttttggtcactgtgaataatgctactatgaacattcacagaggacctttgcacggacacagattttctcacctaggagtgaaattagtgaatcccatggtaaatttaacttcttccctcctgaaacaattttctttcttagcttccaggacacatttggcttcctcctgctgtgtccgctacttcttagcttcctttcctggctctctctcttcctctccacctgccagatgtgacgtgccccaggggatcccagacaggccctgttctctattctacccacacctactccctagggatcccatttgggctctgactttgaaaatctctgtatatgcggatgactccaaatttgtatctctgcctcttcactgaacttcaggctccccttgtacatccaactgccacctgacatccccaccggtccagagtggagactgggatcatgcccacaaatctgttcctcccacaggctccccatctcagtaaacggcaccttcatttttcccattgtgctggccaaaaccttggaatcatcctggattcctctttttttcccacactctacctccaatccatcagcaaatcctgctggctctgccttcaaaatgtacccaggatccgaggatcgcttgagcccaggagttcgaggctgcagtgaaccatgactgtgccactacactccagcctgagcaacagagtgagactctggctcttaacaacaacaaacacacacacgtgtacacacacacacacacacacacaaaacagccaggcatggcgactcatgcctataatctcagcactttggaaggccgaggccggagaatcccccgaggccaggagctggaaaccagcctgggcaacatagtagacctcatcactacaaaaaaatttttttaattagccaggctgggcagggtggctcacacctgtaatcctagcattttgggaggccaaggcgggcggatcacttgaagttgggagttcaagacaagcctggccaacatggtgaaaccccatctctactaaaaatacaaaaattagccaggcgtggtggcgggaacctgtaatcccagctacttgggaggctgaggcaggagaatcacttgaactggggaggcagaggttgcagcgagccaagattgtgccattgcactccagcctggatgacaagggtgagactctgtctcaaaaaaaaaaaaaaattaggcatggtagtgcatgcctgtagtcccagctacttgggaagctgagatgggaggatcacttgaacccaggagttcgaggttgcagtgaactatgatcacactatagtacaccagcctgggcaacagagatcctgtagcttaaaaacaaaaatgtacccaagagccaatcacccttcacctcatccacctctgccctaccgcagggccaggtcatcacatgtctcacctggactctagcaatcaccttctccctggtgtctgtgtcccatccctgccccgacagtctattctcccacattgcctgaaggatcctgttagcacccaacgtcaggtcagggctttctttactcagagccttccacggctcccagctcacccagagagcagccatagtccccacaatggcccacggggtcctataggacatgtctcctccccattgcctctctgccttcacctcctcccactctcaccctggttccctctattccagccataccagcctcatggctatttcttcaaaactccagtcacactctcactgcatggctcttagactttctgttccttctgctgaaatgctcttcccacaccaacttcctttacctccttccatttttttctcagtgagactttccttgcaaacctacttaacattatccccccaacacttcctacctctttctttttctttctttttttttggaaacaaagtcttgctctgtttcccaggttggagtgcagtggagcaatctgggctccctgcaacctctacctcccgagttcaggcaattttcgtgcctcacccgcctgagtaactgggactacaggcacacaccaccatgcttagctaatttttgtatttttagtagagagactgggttttgccatgttggccaggctggtctcaaactactggcctcatgtgatctgcctgcctcaacctcccaaagtgctgggattacaggtgtgagccaccgtgccctgcccttaccccattctctgctttatttttctctagagcactcatctccatctaccatgctgtacatgttacatattgtcctgttcactgtctgtctgcctgcactggaatgcaaggaagagatgaggacttgctccctggagtagccccagcacctaaaacagtaactgacacatatctgttaactgaattaacacaaactaagccaaaaaaaaaaggacttgttggctaatagacctgaaaaaatctgggactgggatagcttcaggcatggctaaatccaggagctcaataccatcagaactcattctttccatgccttggctgtgttttcctctgggttaacctcactcacaggctaactccccaagcatggcaattgcagctctttccccttttcccattattcctgcaggatttcaagtctcaagggaacaatttgggtcatgtgtctattcccaatcactgtggccagaggatggacagctctaaagggctgaaagcccaggaggcagccaggggagtgtgaaccttccagaagcttttctgatggccccactcagcaactctgcctccagctcattagcccaaactcgctggtcattcccagcttcaagcacctttgggaaagtggaggctttatcttgccagcctccaaaaagagcaaaaggcaaggggaaaggggttgtgaagagcttttgggtgaagagtacagtactttcacaggctcctccaacctcgaagaacagggagaaaggaattgaggacaaaagtcaacacgcctcaggcaaaccatcttatgcaattttgcccaaggctgcagtttcagttcaatgaaatcctacaaccactcactgggcaataatgccatgcaaggtttttctatcttggcactactgacattttggacagaatgtaatgattctgggccgggtgcggtggatcacgcctgtaatcccagcactttgggaggccgaggcgggcggatcacgaggtcaggagttcgagaccagcctgaccaacatggtgaatcccccgtctctactaaaaatacaaaaattagccgggcgtggtggtgtccgcctgtaatcccagctactcaggaggctgaggcaggagaatcgtgtgaacctgggaagcagaggttgcagtgagctgagattgcaccactgcactccactccagcctgggcgtcagagctagactccatctcaaaaaaaaaaaaaaaaaaagaatgtaatgcttctctgttgtgggggctagctatcctgttgattgtaggatatttcacagcatccctgacctctaaccctagaccccatccccagtcatgacaaccaaaatcatctcctagacattgtccaatgtcctctgctgggcaaaatagcccccagttgagatgcactgcatttctacagtctaagttccataagagcaggttgcctgtttgctttacagctgtgtcttccgcacgtagcacaatttcttggcacatagtaggtgttcaattaatagttcttgagttgcatgaatgaacaaatgaatgaatgcctgatgcagtgcagtactggggtccacacagtgaagaacacacagaccttacccccaagaagatcaagatctagtagaagccccaaagtgtttccaaaatggggaaccttctgtccctctcagtgacatgtcacaggaactcacaagctagcaggtcagaggctatgccaccaaaccacagtgggcttcatgcgctctgcagacataacagccacggtcaggcttacagtcaacaagggaaccagaacagtgaggccagctgggtggtaggcccgctagaaaaaatttaatccctttgaacccatgagcaacaatgtgatgtgtcgttttctttttcttttttctttctttctttctctctcttttttttttttttttgtgtgtgtgatagggcctcactctgtcactcaggctggagtgcagtggcataatcatagctcttcgcagcctcaacttcctgagctcaagcgatccttccacctcagcctcccgagtagctggggcaataagcatgcaccaccgtgcccggttatttatttgtttatttatttatttattgtagaggcaagatctcactatgtttcccagacttgtctcaaactcgtggcctcaagagatcctccagccttcgcacccccgaagtcctgggattacaggcatgagccaccaccccagcctgttttatttttctattgagatataatacacatatgtcaaaattacccttttaaagtgtacaattcaatggtttctagtatattcacagagttgtgtaaccatcaccacaatcaatttttgaacattttcatcaccccaaaggacacttataccgatgagcaaccactcccatttaacccctcctcccatcctctggcagctgccacctgctttttgtttctatacatttgcctgctctgggcatttcatgtaatatgtggccttttgggtctggcttctttcatttagcatcacggtttcaagatctgtccatattgcagcatgtatcaaggcttcacgcctttttgtggctggataatatcccattgtatggatagaccacacttcatttatccttccatccatccatggacatttgggctgtttccactgtttggctattgtgaataacgctgctataaacatccattttttacgagattgtgtgtgtgtaccttgtaccattttcttgggtgtatatctgggagtggaactgctgtgtcttatggcaatttggtgtttcctgaggatggctctgctttgaggactgtgctgaaaatggtgggacaacagtttccagcctcttggacttctcaaaggcagtaaaaattcttaaaaataaaatgaatgattgggcaaccgaaataagatggtctactttttatattgccaagtaaagactacaggataaaataaaattaaagaaatattttttccattacttcacagtaaaagaacattttaaccaccaacatcactacccccaaaaaggaaaggagattaatatattaacataaatggtagttgtttaagtttactttcatgaaaatttcactacatgcctgtgtgttcccccatagtaccaggaactgataaacaaagaagcaaacgacctcctcaccatctacagtctagccaggtgatggtgggggggggggcggagagagaaagagagagagagagagagagagagagagagtgtgtgtgtgtgtgtgtgtgtgtgtgtgtgtgtgtggtcagaggatgtcggatgtcagatatcccaactctaaggaattctgagatgtgtaaaagggattgttttgcccaaaggaggttttcaggctctgaaaagaataaaatcccaggataactgctttaatggaggcacaagcaacaagagaaccccaagacagaaattagttctgattggctgggaacggtggctcacacctataatcccagcacgttgggaagccgaggcgggcggatcacatgaggtcaggagttcaagaccagcctggccaacataacgagaccccatgtctactaaaaatacaaaaatcagccaggcgtggtggagcacacctgtagtcccagctactcaggaggctgaggcaggagacttgcttgaacctgggaggcagaggttgcagtgagccgagatcacgccactgcactccagcctgggcgacagagtgagactcagtctcaaaaaaaaagaagaaagaaattagttctgatcatgggaaaaccaggtgagtagcaatgatctcagcaggctgagatgaattctatgcagccacaagtctgggagataatgtttaccagaccagagagaatctgtaattcctacggccttggtaccttcaggaatagagagattctattgccaaataatgacttccaggtggtgcattaatgacaacagtgggtagttttggtcccctctgccgctgggcccaggggactctgggaaccatcacccttggtgggatctggcttgggagttggccctaaatcgcctgccatgggagcgggtttagaggggaagcagtggccccccaggaggtcaggggtcctagagtcatctagaagaacaacagaaagaaatacctagggcaggtcaggcgcggtggctcacgccggtaatgctagcactttgggaggccaaggtgggcagaccagctgaggtcaggtgtttgacaccagcctggccgacatggcgaaaccccgtctctactaaaaataccaaaaaaaattagttgggcatggtggtgggcgcctgtaatcccagctactggggaggctaaggcaggagaattgcttgaacccgagaggtggaggctgcagtgagtcatgatcgtgcctctgcactccagcctgggcgacagagcaagaatctatctcaaaaaaaaaaaaaaaaagggccaggcacagtggttcatgcctgtaatcccagcacatggggaggccaaagtgggaggatcacgaggtcaggagctcaagaccatcctggctaacacggtgaaacctcatctccactaaaaatacaaaaaattagctgggtgtggtggcacgttcctttagtcccagctattcgggaggctgaggcaggagaatcacctgaacccgggaggcggaggttgcagtgagccgagaaggcgccactgccactgcactccagcctgggcgacagagcaagaaagaaagagagagagagagagagagaaagaaagaagagaaagaaagaaaagaaagaaagaaagagagagagaaagacctagggcagcagacaccaggctttggtctgtgaggctctgataccccgccccccacaagctgctgaatgtccttggagaatgagaggcgaggggatgggaggcaatggggctgaaatcacttctaggaaggaactaccctctgtgctttcccatcaggcaactgaaggagcaagttcccggggctggaagcacagcaatgagagggaagcacagaggtcacgggtgacagtggggaaaacgaggcagcagtggaaatgtatcagaagcaaaatgtgctgggttttgcctaaggctagcaatgcaaaacaaatcaggaaagtcccctggacttcgtgaggtgggctcaggcacacatggaaaattgtggtgagggaggagattttttcctaattagcactgagggatccaataagccaaacctttttcacacatgacatagctatcagattttatcccggtgccagggaagctcacgagaatgattctgagacaagatgatgaagccaaaatctttcccccggctttttttttttttttttttttttctaaagtgtaaaacaggaccaggtggtgagtctagttgaactgctcgagcattggtgctctctggtggccaatatagaaattgcattggcagcggtgcaaaagttttcctttttatgaaaaaagtcagataatctaagaggtgttgcagaagctagcattgcttaagagggatgtttattggaaggtgtaatcttggagttagaatctttaacatgcttcttctgaaaccagcttttcctcgttctctgtcttggtaaatggcctgaccacccattgttccccaagtaagaaacgtgggggtcacactagacacctactctccctcatcttcacactcaggcagtccctgaggcttgtgcccttaactgtctaaatttgcctttttcttcttcttttttttttttttttcctgagacggaatctcattctgtcacctgggttggagtacaatggtgtgatctcggctcactgcaacctccacctcccgggtcaagcgattctcctgcctcagcctctggagtagctgggattacaggcatatgccaccacgcccagctaatttttgtatttttagtagagacagagtttcaccatgttggccaggctggtctccaactcctggcctcaggcgatctgcccacctcagcctcccaaagtgctgggattataagcgtgagccaccatgcctggccttttttctttatttcttttttcttttcttttctttttttttttttaaagtttgggtctgctctgtcacccaagctggagtgcagtgggtgacagagctctctgagacctcaaattcctgggctcaagcaacagtcccacctccgtctccaaaaccactgggattacaggtgcaaaccactgggattacaggtgcgagtcactgggattacaggtgcgagccactgggattacaggtgcgagtcactgggattacaggtgcgagtcactgggccctgcctacctagcatcgcttctgtcatattctgttagcaacactctccaaagcccaaccagtttcaaggggaggggatgtagacctcacctttcaatgagaagagtgtcaacgaatttgtggactttatttcaaaacagccacaacaactaattcctgataaaaactgaaaatatgacataataaggctttaaccacccccacgtttgtttatgtgtttatgatctgtttcccacgctacaaattaagcttgatgagggtaaagacttgggcattttgcccactgcagtgtccctgaggccaaggacagggctgaagaattacacggtgattagatcagaggaaatatcaccgtctcccctcctcctgtctattttaggccaaagcatccttcaacatccagctcacagctcttctccgtggtcttctaaactccagtttttctttgcctattcacctgagggtcactttgtgctatactaagttgtcacgtcttaaattacagcatccagtattaccagttcagctgctggagcctgacaccctggacccaaatcccagctctcatgtgaaccagccatgtaaccttggacaagaaacctcagttttctcttctgttaaatgggggaaatattggggattttgtaaggattcaatgagccaatttaagtaaagcactcagaacagtccctggcctataggaagcaccagagaagtagtgttagccactattgcctcttgtatctctgcattgtagggttctttatccatcaattttttctttctttccttctttctttctttctttctttcttttctttctttttctttctctttctttccttcttccttctttctctccttccttcctctttctttctttttctttccttcttccttctttctctctccttccttacttcctttctttctctccttctttccttccttcctttctctctctctctctctttcttccttcctttcctttctttctttctttctccttttctcttcttctctctctctctccctctctctttctctttctttttttttttttgagtcagagtctcactctgtcacccaggctggagtgcagtggtgtgatcttggctcactgcaacctccgcctcacgggttcaagcgattctcctgcctcagcctcctgagtagctgggattacaggcatgtgccaccacacccatctaatttttgtatttttagtagagacggggttttgctatgttggccaggctggtctccaactcctgacctcaagtgatctgcccgccttggcatcccaaagtgctgggattacagacgtgagccaccatgctcagcctctttcttttttgagatggagctttggtgtgttacccaggatggtcttgaacttctgtgctcaagtgattctcccacctaagccccccgaccaagtagctggactgcaggcatgagccaccatgcctggctgtattttcttttcctaaaccgctttatcaagatacacttcacataccatagaattcacccatttaaagtgtacaattcagtggccttcagtatattcagagtcgtgcaaccatcaccaccatctaatttgggaacattttcatcatcctgaaaatgaaagccagtacccatgagcatttactcctcatttccccctcctcctaatgcctgacaaccacgaatctactctcagtgtctgtggatttgcctatatccatggtattttgtttcttgcatcctttcatctttgtcttgttttctgcctcccaataataataaaccataagaccctggacactctgtcctctcttttgtgtcccttcctggacttcagtgagtgattcacctaatgggcatctgctgatcaagtaatacactggccctttgactgagaacaagcacagagcatctacaatgcatcgggtaatattccaggtgctgcatatacattaactcatatgatccttacacagaaatccatgacacaggcactgttattatccccacctgactgatagggaaactgagacaggagaagttgagtaccttgccagagtgacatagccagcaaggaggcaaagccagaattcaaacctggacatttatgcctggagtctgcactccaccactgcaccacactttctcctgtgaggccaagtggatgggccttcatttgcgagcagttccaggaaacctgcacgggggctgggaaagagcaaggtggaagctgctgtagatgctccccccaccaaccaccaccagccaactacgtcccttagtatttcacagccttgtgtagctcctcaagtgtgtattctggactgctctagcaacttgatttaaccaatagaatgtagtagaagggacgctgtgccactccaagtcaaagcctaaagaaggcctggcagggcacagtggctcacatctttacagtacattgggagaccaagccagctggatcccttgagcccaggattttgaaaccagcctggggaacatagtgagaccccatctctatgaaatttttttttttaaattagccagagtggtggtgcactcctgtagtcccagctactcaggaggctgaagtgggaagactgcttgagcccaggaggtcaagggtgtagtgagccatgattgcaccactgcactccagcctgggtggtagagtgaaaccctgtctcaaaaaaaaaaaaaaaaatcctggtggcttctgttttgtcactttttagaactctgagtcacaatgtaagagatctggccaccctgctgaagaaaccacataggaagaggccctcagtctacacagggagcgctccaggtatcccagctatcccagcattttggctgtcccccctcaaagtcccagacatgtgagtgaaccattgcagacattctagcacagttgagctcccactgatgacctcagatttagttaagaccacatgcagcagaagagccgcccagctgatcctagtcaacccagagcatggtgagtaatcatcaactattgttttaagccactaaggagtagacagtcaaacagcagtagataatcaaaacaaggagtaagaccacttctgtggacagaagacccatgaagggtctgacctcatgattccacagtctcctgctgactcaaagaagagggtagaaagctaatcagaagagctgagtgtctgctccagccagcagctggggtgcagattcatgaccttcactcagctggtcagatgtgttggctcaggactttgaatctggagtaagcaacacaaaagaccaggaggtttagacttgttctgaaaggagtggtggtgacatctgactagcatcttgtttccagtggcagcccctgaggcaaggccaagagtggggatgcagcatccagccaagacagcaacagcatcctttccagaatcttctttggtgcaatttctgaacccttcacatccctcattttccacctattttctgagcctgattctccagtcttctgattcattttgaaaaagactctcatcattccaggaaagcacttttgcagctgaagttagcagtagtttgtgtattgattgggtttgtttgcatgcaacagaaaactcccaaacaactgtggcttaaacaagatagttgattttctctttgtgaaaaatgtacagaactcagcagtccaggtcccaccaggtcttcagagacccagtatccttgtgtcttggtgctctggctccgctccacgtggcacattgcctcagggtctaaaatagctgcccaagctccagccattgtgttcacattctggccaggagagaagaggaaaggttaaagaaaaacatgcccctccctttttaggaaaccacttggaagtccctcctaatcctttgcttatatctcatagctagaacttaatcacaagaccacgcttaggtacaaggaaggcaggaatgagcagtccttagctgagcggttaggtcctcaactaaaaataagagttatgttgctaaagaggaaagaaagaatgatgctgaaggaggctactggagatctctgcctgggtctgcctctgctgtgttcaaccaagaactctgcatgggagagccaagccagactgatgcaaggcaagtgagctccaaaactggggcttcacctgggagggttcttggctttacccagcagagaattcaagggcaagtcagtggtgttagacagcaacttttattgaagcagcagtgtacggcaacagcagaggtactgctccttgcagagcagggctaacccctgggcataggggttgttggcagctgtatttatatccacttataattatatgttaatgaagaggcacgttatccagaactttctggaaaaagggtgaggagtttctgaaaccatataaagtaacttcctggctgttgccatggcatttgtaaactgtcagggtgctggtgggagcgtctttgtgctaacgagcagtgagggcaactagaggtcactttctttgccatgttctgtttcttcactgcatcctgtttcaaccagatcctgctctgatgagctgggttgctatggtggttgtgatcagtgctcggaaaacaagtcctgctgatttacctcaagactgcgagatggtggccacgggagaggagggaccctgacaatgcctaatcacgttgacccagctggctcctctcttaattttctccaattcttttttatttttgagatggagtctcactctgtcacataggctggagttcagcttactgcaacctctgcttcccgggttcaagcgattctcctgtctcagcctcccaagtagctgggactataggcacccaccacaatgcctaattttttgtatttttggtagagacggggtttcaccatgttggccaggctggtctcgaactcctgacctcaggtgatctgcctgcctcagcctctcaaactcctgggattacaggtgtgagccactgtgcctggccttctccagtttttttaaacccttccacctcatttgtcttaaactcccaccagcacttccctgaccctggatcccctcattttcctgatccattttctatccaaggaaaacccacagtcccaacccacttcctggccagtctagctcccatgcctttatacatgctgttcctttcacctggaagggccctccttctccctgtggcttatctaaaggttacctgtgaggagcatttgtcatgcttcttggccacccagtatcttttgtttgtttttttgagactgagctggagtgcagtggtgcaatcactgctcactgcagcctcaacttcctgggctcaagcaatcctcccacttcagccttctgtgtagctggaaccacaggtgtgtaccaccgcgcccgactaattttttcattttttatagagacagggtcgaggctggtctcaaattcctgggctcaagccatccttctgcctcagcctcccagagtgctgagattacaagcctgagccaccgtgcctggcccccgcctcaatctttaaagccggtaatgtcattctgaaggctcccttgttaaataaaaaataaaaagccagtaacggcatcaccccaacctctgcttctgtcatcatatctccttctctgaccctgacctccctgcctccctctccctgacctccctgcctccctaagtacccctgtgattacatttggcccacccagataatccagaataatcttcccgtctcaagagtcttcatttaatcccatctgcaaagtttgccacgtgaggccacgtattcacagatcctaggggctcaagatactggaatctttggggtctaatatgaatctgtccactacagttaggttccccagaagcacatcctcagacaaggatttgggtgcaaatggtttatttgggggtgcttccaggaagcagcagtggaagagtggagaagtgaaactgggaagggaaggaagcctgagggggtcatccagccagacacctctgcgggcacctgaggctgagtccccagggcacctctaggaaactgagcagagaaccctacagcgctgtctgttcttccctgtggggctttccccaggctgttcaccatctggcacttctggtctgccccgtcttggctgaacacacatctgcagccagagacagcactcaggcctagagtctggcatatttaaaaccaataaagtaccgaaacagtgtgtagcagacactgttggtgcccccagctgtctgccctgggcactcacttctactcactggaggtagctgctgtctgagggcacctgctatgttctggccctggggctctaggggctggcagtctgagtgcaggaccaagtgtcagagttaatgtccctagaacagcccttatgcaatggcagatgggaacctggcgaatgaacatcccagcttcctaatccctcagctggggtaactcagacgggtctacattggctccccagctccccagtggggttgaactctggtgccctcggaggtcaccagctggtgtcacacctgcattggctgccttcccttctcttccctgctccatcccacatccctgctgatgggtcctgggatcaccacccaaatatatgggaatccctgtcatagggttgtcttttgggggagcccaaaccaagacacagggacaaaaataaaccccacaacttaaaccacacaactgcggtgtgttacatatttacattgaagaaattcacatttttttagtgcagctggacacaaagaacacaaataagcagaatataatttacattataaattacatgctggtagattccctgaggtcaggagttcgcaaccagtctctactaaaaatacaaaaaaatcaaccaggtgtggtggcgggcacctgtaatcccagctactcgggaggctgaggcaggggaattgcttgaaccagggaggtggaggttgcagttagccaagatagcgccactgcactccagcttgggcgacagagcaagactctgtctcaaaatacacacatacgtaaataaataaatacataaaacacacatgtacacacaatgcagctatattatacatacacacacacatgctgtctcctttgtagagaattccaaaagtctatatttgaggctcctccttcatatgaggcccagccaaatgatgcttctgcctcgaatacccctcctagccctgacctcagaattgagggggttgtatttgagttttgtcttaaagtacacatggaaaatacacatttcaggccgggtgtggtggcttactcctgtaatctcagcactttgggaggctgaggcgggcagatcacttgaggtcaggagtttcagaccagcctggtcaacatggtgaaactcagtcccaacaaaaaaatttaaaaactagccagtgtggtagtgcttacctgcagtcccagccactcaggaggctgaggtgggaggattgcctaagctcgggagttcgaggctgcagtgagctatgatcacatcactgcactccagcctgacagtcagagcaagactttgccttaaaaatttttttaaaaattgtctagtagtctagcacagctgctggacagaggggcactgggagtaggattgctagacaaaacacaatatgcccagctagattcgaatttctggtaaacagtgaatactttttagtataaccacatcccaattattgcatgggaccctcttttactaaaaaaagtatttgttgtttatctgaagttcagatgtaactgaacatcctgtatttttattttctaaatctggccaccataactgaaagagagagagagaacagtgagagggaaagcgagacataagaccacagggacacaaaaatggggacagacagagaaatagggacaaatagagaaagaataaaggagagatggacaaacacagatatggccacaagatgcctgcagtaggaaaacagaagaagaggcagaaagggggcagacccagagaccacctcctagactggggaagatagaaggggaacagcccagcgtggacaggggcctagccagagttccttccccaggcaaggctagggagagaagcacctacaggagggcacagttttaaaaaaaattgctgaccaggtgcagtggctcatacctgtaatcccagcactttcggaggctgaggcgggcagatcacgaggtcaggagatggagaccatcctggctaacgtggtgaaaccccatctctacttaaaaaaaaaaatacaaaaacttagctgggtgtggtggcatgcgcctgtagtcccagctactcaggaggctgagacaggagaatcacttgaacccgggagggggaggttgcagtgagctgagatcgcaccactccactccagcctgggtgacagagcaagactcagtctcaaaaaataaataaataaataaaattgctgccagaactctagccataaagtctgcattccagtcaacagaaccaaggaagagtagaagaaaggcacttcctgtaaattgcatccaatctgccagaatttagtcacatgggcacaaccagaggagccgaaaaatgtggtccttaatccaggtggccatgtacccggctaaaatttgaaggttcttttctttttctttttctttttttttgtttttttagagacagggtcttgctctatcacccaggctggagggcagtagcatgatcatggctcactgtagcctcaacctcctgaggctcaagcaatcctcctgtctcagcctcccgagtagctggaaccacaggtgcatgccaccacacccagctattttttttattttttgtggggatggcagtctcaccatgttcccatctggtctcaaactcctggctcaagtaatcctcctgcctcagcctctcaaagtgctgggattacaggtgtgagtcactgagcccaactgaagtctgaagtttctttctttttttttttttttagacagagtcttgctctgttgcccaggctggaatgcagtggcacaatcttggcttgctgcgacctctacctcccaggttcaagtgattatcctgccccagcctcccaagtagctgggactacaggtgcgcaccaccacgcccagctaatttttgtatttttagtagcgacagagtctcgccatgttagccaggctggtctcgaatccctgacctctggtgatccacccgcctcagcctcccaaagtgctgggattacaggcatgagccaccagtcccagacaaagtttctatttttaagaaagaagaggaaaatggatcctgacactgtcccttcatctttcttgctggaatagggatgttttgcctgcaactgtggcatcttttttttttttttttttttttttgatacagagtctcactctgtcacccagggtggagtgcagtggagtgatcttggctcactgcaagctccacctcctgggttcatgccattctcctgcctcagcctcccaagtagcagggactacaggcgcccaccaccaagcctggctaattttgtttttgtatttttagtagagggggtttcaccatgttagccaggatggtcttgatctcctgacctcgtgatccacctgcctcggcctcccaaagtgctgggattacaggcgtgagccagcaactgtggtatctttaaagaccactattgtgcctaccatatagaaacaagtggtcctccaaataactgctgatttaatattaaatccgtaaactctactcaagccagttccattcattcattcattccacaaatagttattaagcgtctactatgtgttctgggcatagagctacgaaaaagacaatgtctctgccttcatggaattcacattctgcctgtggaaggcatgatgataagtgagcaaacacattgtggaaacccaactttcctttaaagatggagcctaataattctccccttgagtgtgagctggacttagccactcacttctcacacgactatgtgtaaaggaaaattgcattctgtctggaactttaccaaatactgttcaccattttaagaccacatcacccatatttatgcctaccatggtatttgagtcaccaaaacagcactcctggtcagactgcatggtgggccactttggaactggtgataaaaattgcttctgctggctgggcgcggtggttcatgcctgtaatcccagcactttgggaggccaaggcgggtggatcacgaggtcaagagattgagaccatcctggtcaacatggtgaaaccccatctttaccaaaaatgcaaaaattagctgggtgtgggggtgcaagcctgtagtctcagctacttgggaggctgaggcaggagaatcacttgaacctgggatgagtaggttgcagtgagccaagatggtgccactgcactccagtctgggcgacagagcaagactccatctcaaaaaacaaacaaacaaaaattgcttctgcttccttcagtctctttccctttttctccctctctctctctcttcctctcattttctcttgggtcactcactctgggaaacaggagataccacagcatgagcacatgcaagcagctctaccgagaggagtggaactgaggcctctgtcccatgagagggagcctctttggaagttgatcctccagccccagttgagcctcatctgactgcagccccagatgacagctcaacagcaatctcaacagatcctgatccagaaacacccatgctgctcccaaattcctgacccacagaaactgtgagataagaaatgtttgcttttaagctgctaagtgtcaggtcatttatcatgcagcaacagataactaatatacagataaataaacaccatcatttaaaattcagttcagtgcaactaacaaaagatgatatggaagcaagtagtggaggtaggagggataaaactgggaggttggtgaccttgtgggtgacattgagttgagggcagagtggtgggaagggggcagccatcagtgctttccaaccctagcagatactacacacccccttttataactgcaaggcctttgttagctgttctgaaatgaaattcataggtaataaaatcttcccacacacagttttaataagactacgaaggtgaaacaaaaggaatgcaatgtataatttgcaaattttatttcaatagataaatgctcagatacaattacactagaaggtgtaatgaagcaggcggatgctggaacctaaaagtgggatcccctggaattgccacagccatatgtgcaggctgattggagtgccctagcagcaaatcagataccatagctggtgtaaatgacagcaatgtggctttgaagtggtaaatgatatttggtaaagttccagacaaaatacatttttctggccaggtgtgctggcttactcctgtaatcccagcactttggaaggtggaggtaggaggatcgcttgagaccaggagtttgagaccaacctgggcaacacagggagaccctatctccacaaaaatatttaacaattagtcaggtacggtggcacacacctgtagtcccagctactctggaggctgaatttggaggatcatttgagcccaagaggtggaggctgcagtgagccatgatcacaccactgcactccagcctgggcaacagagtgagactctgcctcaaaaaaaaaaattgtaaaattagccaggcatggtggcacacatctgtaatcccagcactttgggaggcaaaggtgggaggatcgcttcagccagaagttccagaccagcagggacaacatagggagacccccatctctacaaaaatattttttcaaattagctgggcatggtgttgcatgcttcgatcacaccactgcactccagcctgggtgatggagtgaaaccttgtctcaaaatacatatgtatatatacatatacatatacatatacatatatatttcccttgaattgcaatgatatttgcatttctggaaaatgtggtgatattaaatctacacaagggccgggcatggtggctcacgcctgtaatcccagcactttgggaggccaaggcgggcagatcacttgaggtcaggagttggagaccagcctggccaacatagtgaaacctcgtctctactaaaaatacaaataaaattagccaggcgtggtggcgggtgcctgtaatcccagctactcaggaggctgaggcaggagaatcgcttgaacctgggaggcagaggttgcagtgagtggagatcacaccactgcacttcagcctaggcgacagtgcgagactccatctcaaaacaaacaaacaaacaaacaaaaaaactacagcaaaaaacattttatatgtaaagcagatttagattctaggctcagatcattatcaataagtttttcatctccaggagtgtctggccatgtggcatacattgaattgtttgttacataggattgttcagctctctgcaggatgttatctagcattcctgttccctctattacgacaacagaaatatccccccaacaaaatttcaaaatgcgtctgggggtggtactgccttcatggagaagcactgattaagagggacagaaaaatgtaagacaagcccttgatgggaacaaaaaggagcccagagtggccagagtcctgaagaaaagcaggaaggagatgagctcagagaaaatggcagggcctctatcacaccttgttggccacagtatgatactgaacttggactcaattccaagggcaatagggagcctctgttggattttcggcaggggagtgacatagtctggccttgctgtgtgtgtgtgttggggggagtggggtgggatcaaaacatgttactcagcagactgcactgtactctagagaatttcattcattcattcattcattcaacacataaggattgaggtgtgtctcagtgatctattgctgtgtaacaagcaagaccccagaatgtagtggcataaagtaatgattttttgttttctgctattctgtggctcagctgggcagtttttctgctggtctcactagtcacttgtgctgctgtattcagctggtgggtcggctgggagagctgcaatgactgggctccctatccacgtgctctttcttctggggctgctaccattttgttgttattattgttgttgttgtttgagacagagtcttgctctgtctcccaggctggagggcagaggggcagtcacggctcactacagcctccacctcctgggctcaagcaatcttcccacctcagccctccaagtagctgggactacaggcaggcatcactattcctggataattttttaaattttttgtagcatcagggtcttgatatgttgcccaggctggtctcgaactcctgggctcaagtgatcctcctacttcagcctcccagtgttggaattacaggcatgagccactgacctgcccagggctgcttctgagtgtcattcagcattcccaggcagtaaaggaagaagtgagccagggctgttgatgctctgggacttgtgcagcctcttttctgtcacattctattggtcaagaccagccacaaggctagtctaggttcaggctggtggagaaacaaactctacctcttgctgggagtgactgcgaaatcgcattacaagcagtggaacttgcagaatttaaggccatgaaatattcaacgtgactgtagaccgggccctggggatatggcctgcccctctgcaaccgtgctttagtgagacaacaaatagtcaacacgtacaaaagctcagaaagtgctgtggaaaacatcagctagggagagagggggctacttgagacaggtcagggaaggcttcccagagacgtctgagctaagacccgagcactggagcatgcctgcctgggatgtctgtgcctctgaggtttccaaggaagacaactgtctttgcataagcccatggctgcccttgggggaaggggcccaggggacaccactaatggttgctgtgatagcatcattgtggaatggagtggaagctgccttggggccagagtatctgtcccccagcactcatttgcaggctgtgtgacactggccatctgggtttcttcccctgactcccaaagcccaggtccagttcactgcactgtgagggttcacaggtttataacaggataaactacagagagaggtcagtgcttcctggtatactatgcacagctgcgacactcaataaacagaagttcactgaactgcaaggtcactgctgctgtgacaggagggtcatatggatgtgtgtatcttgccagtggctgtggtgaaaccctgcttgtggagaatagacataaacacaccttctctctctccctctctgtcttcctttcacctcccctctccctccaccccttccatttcctattctcccagcatgttctttccactcttcctcacctccttccccttcacctccttcctacaccattcctttttccatctctttcctgttttcctaacttgttactctcatctttttctttcttttctgttcttcctgacagctccccttcctacctcctctcccttcaccctttctcctactctttcccctcctctcatttctacctctctttccttttcacttcccctctccctcctgtctttctcctttttcttttacctctgtgcctccctctcacctcttcccacaccacctcatctcctccataactaactcacctcctttttgtttgtttgttttttgagacagggtctccttctgtggcccaggctggagtgcagtggtgccatcacagctcactgcggcctcaacctccgaggctcaagcgatcctcccacctcagcctccccagtagctgggaccacaagcagcgccaccaggcccggctgttttactttttattttgtagagaaagggtctccctatgttgcccaggctggtctcgaactcctgggctcaagcgatgctcccgccttggcctccggaagcgctgggattagaggcgtgagccgccgcgccgggcctccccccttcccctccgccgccgccttctcatcgcccttcctccttcctcctgacgccccttactcccgatcacttctcattcattcaccagcttccagtcctcgctccctcacctcttttctttcctactcgccttctcctcctgcccctttatcatctctccttgtcaccgttcttttttgccaatcctctcgttccccttcctttcctcatctcctctcttacccacgtcatctccattctcgtgctccccttcacctcccgttaccttgcgcttctctcctctcatctccatcaccacctctccccgctttcgcctttctttagcccccgcgtcccctatacccttcgcccatgcccactcccctccccaccttctcttcttccaccctccaccctcgccttctgtctctcgcccacctgactccgctccgcccccagccttaggctccgccccgctgggggtcacggggccgacggacgctaggcggccgtagcggcctcgccagtcacgtggtcacgtgacgcgctccaacatggcggcgccgtggggccgaggtgtcgcttcctgacggggcggcgcggacggacgcggccggtgccggccgggacgccgggcccgcagcctagctcgccatctcgctcacgccgcccgcccgcggggccgtcagcccccgccgggccggggccatgcaggagagccagaccaagagcatgttcgtgtcccgggccctggagaagatcctagccgacaaggaggtgaagcggccccagcactcccagctgcgcagggcctgccaggtggcgctcggtgggtgagccgctcccgccctgccccgcgctggcctcagcacgtcggccgttgccctatcctactcggccttggcccggcctcctggcctccgcttccccccgatcccgaattccacccttccggcctcctcctcattatacccccggaggaagtgttgcccgggcagctcgggactggcccaaggtcacctagcaagttggtgacaaccagagcttgttcctcagggttccagctcagggcttttgccacgattccttgtcgccctgtttcctggttcctcccctcaccacctccaagtcctagaaacagtagcccttgccccaagttttttcgttacctgagctctgctgattggggttcccctaggtgaacagagcatgtaggaagagccgtccaactggtttagggaaacccctgattcttgttttggaagtgcccgttggagaatgttttcctttggtttggggatctcccatagctctttccctcaaggaaggattgtagaaggtgttctggatctcccaggcattgtagtgagcaagacatctgcttattcctagcagtccactaaaatacaaggtcttcagcgcgaagatacttgtctgacttattcattgctgtatcccttgcgcttgcaacagtgcctggcgcacagtaggtgctcgataaatatttgctgattgaatggaccctcagattatggaaagagggagaattctaactaatagttaaaggcttgataattgatagcaaaatcactatcctatctttcagttttaatcatttaacaaatatttatcaagtgcccactgcataccaggtactgagaattcagtggggaacaagacggacatggtccttacccctatggagcttatactcgaatagaggagacaaaataattaattaagaaaataggtgaggtattttggaatactgataaatactattttgaaaataaaacagcaagatgtgataaagagggcttgaggactgctttccatggtcaggaaagtaatcttttccaagaggaaaagtaatcaggtggtcaggaaagtaatcttttccaagagggtgacacttgagctgaatactgaaaggcaagaactatccaccatatggagtttcagaagagagttcttggtgggagaatccatgcatttgaccagagctgttttcaagctaattcactgccccaacgtctttggtttggaatctgtaaaggcctgtttttcctaacaaaatgagcaaatggaaagtttgatttttagtcacatagtttgagattgttatcacctttctcctttcatttgctacaaagtatagagtagtgttcttttggcatttagaaataggctggtgaactttgcacttccctggaaagaaggtccctggctttcatcagattttcagagggccctgagactccctcaggggccaactattgatgcagaggtggtagtctagataatctggaaacagttgctagtccgtgaaattcaggatcagtggaaggaatttactgagatgtagatttttaaagcttttctcttccaataaccaaggctgttgggtattttatcagcaatgtgggataagcactgcaaagcagtttgttaggcaagagcctggtatttataactccacgttgaaatctgcctggactctatcttctcgatattgttgtggaggtttcagaatagttatttggcagaagagtttttattttttcttcagaaaacttcttaacataaaattttcaccaaagtgtgcatcatattattggaacctacttataaaattttcatctgggtcatgaagggccattaacgctgagaatttaatagatattttcggatcgtatctttgttcagaagttcaagttttcctaacacaagtagtggaatgcatgttttcagtttttagtagtgaattgtaaaaaatggcctagataggaagtaatttgactacaggttatatgaatcacaaattggggttgtgccaatggcataataggaactgtcataagggaacgtatgcatattgttaagtgaccatcttttttaagagaataattgtgtgtcattgctgttaaatagaaatgactgcttttacttagagtagaacacatagcagaatgcctggtgatatttctctctgtctctcaaggcccagtcttgtgtccagtagtcccatttaagaagagaaatttggggccaggtgcggtggctcacgcctgtaatcccagcactttaggaggctgaggcaggcagatcacgaggtcaggagatcgaaaccatcctggctaacacggtgaaaccccgcctctactaaaaataacaaaaaaaattagctgggcgctgtggcgggcacctgtagtcccacctactcgggaggctgaggcaggagaatggcgtgaacccaggaggtggagcttgcagtgagctgagattgcgccactgcactccagcctgggcgacaaaacaagactctgtctcaaaaaaaaaaaaaaaaaaaaaggctgaaacgagccagtgtataaggagcagctatgtggtattttagagattaccatgtatagattgttgttaattgtgataagaggaactgtaaatgacggctcaaagttgaaatgcttggatgatagagagcatttacaggaaacagcttctgtgatatgattccaccagctgtagcatattaggggagaggatcagggctgcagggactgtatagtgtagatgttagctaggagtgtattctttgggaccctagacttctgtgttcaaacctcctgccttccacttgctacgtttgtgatcttggacaagttacttccttataggattattgtaaagattaagttaattgacatgtgcaaaaaacttggcatgtagtaggtgctcagtaaatgcttgctattacttttttattattattattttaagctgtgacaaaccacagcagctgtaattactctggtttgatgttcttaaccttagttcctcgttcaggaatgacttactgctctatttggtttgtagatgcagtaaataagaatgtaattacgtgattgaaaggctgtgttggagtattaacttcctaaactcaatgaagacaggggttgtcctttgtaaaaattgtgataatcatgatggagcagatttggagtaatctcaatgattcgtccgcactatacaccaaaagcataaatagggactgcccaagtaggggatagtgcccttccaacctttatctggagaaatcaagacagcctgtgagagtattcatcgccccaaggatactgttgctctttaccttgttatgaaactttgatatatattaataatcttcaacctttcagccctctgttggagaatataattacattcttaaacctcccttttataattgtcttatttaagactcatcttctcccatcatgtatctttaagttatgtttctgctcttaaactatatgaagtttggaggcttaataggataatctatttaaaattcgatatggaaaaatttatctatggctgggcactgtggttcatgcctgtaattccagcgctttaggaggccaaggtgggcagattgcatgagcccaggagtttgagaccagcctgtgcaacatggcaaaaccccatctctaaaaaaatatataaaaattagctgggtgtggtagtgcatgcctgtagtcccggctacttgggaggctgaggtgggaggatgacttgaacctaggaaatggaggttgcagtgagttgagatcatgccattgcactccagccgagacagcagggtgagaccctcacacaaaagtgctaagtaatggctaggtgctctataattactagttgtcattattctcagccattatcaagaaaatttaaaaagaatagtaaacatacgtattttcatatgaaattgaatgacttttaaagatcacatgttgtattatatctcctatgtactaagcatttctgagttccaggcacagtaaagtgggcttttcatgcaatttagttctcactattatcatcattcccactgaggcccagagaagttaagttggccagggtaactcagtaagtgatggaaccagggtataaacacaggcaatctggctccatagtccaagatcttaactattactaccatgttttcttgcttctccatatgaaagttgttatgtttgaaatactcagtagagtttttaaaacaatcagtataccgcagtggagtttcaggagactgtattttctatagctgaattttgagatatgtttgaaagccttgagtcaaaaagatcacagctcttttcttcaggtttttactacatatatactaggtttactttaattaggggctaatggaaagaaggaaatgagagtaaagagctggttacacataagtttcatttgagttattcagtttttcttttttttttttgagacaggatcttgctctgtggcccaggctggagtgcagtggtggggtgcgatctcaggtcactgcaacctctccatccctggctcaggtgatcctcccatttcagcctcccaagtagctaggactacaggggcgtaccacccacctggctaatttttctgtttttagtagagacggggtttttctgttgtctgggctggagttaatcagtttttctaattgatgatatctcttcatcagcagtaaactccctcttattaattctggagttgtgacctgttattaattctggattgtgattcatttctttgggtacagcaggcaatgggagaccaaggctaaggaagagagcaacttgcccatccacatccacacagctgggtggggaaacgtagctgcagcacatgatgtagcttcacatagatcataacatccattcttagatttgctcctctgtttaatatacgagatttaggatgtggatgggtcattggtgaccttagcttgagcttttttgatgctgtgatggaggtgaaagccagactggcatgggttgaggcgtgggaggtgaggaaacagatggtgagcatagtcagctctcccaaagtttggttgtgttgtaaagaggaagaaggagtggctcctgggagttgtttgtttatttaaaggtagaaaagattttaactttaaatattgttaagggatccagttaaggaagtatattcctaaatcttagttgtatatgaatgtgtgtaagacatacaaatgggcatttatcatatggacatctgtgtgtccatatgatacataaattgctttttcttccatatgatccttttattctaattttgatgtgttcagaaaaaccattctcatcatgaggattactgtgaaacttgaaaaatataaaaaacatctctaaattgatgtaacgtggcggggcatggtggctcacgcctgtaatctcagtactttgggaggtcgaggcgggcggctcagttgaggccaggggttcaagactagcctggccaaaatggcgaaaccccatctgtactaaaatacaaaaattagctgggcgtggtggcgcacacccgtaatcccagctacttgggaggctgaggcaggagaattgcttgaacccgggaggtggaggttgcagtgagccaagatggcgccactgcactccagccttggcaacagagcgagactctgtctcaaaaaaaaaaaaattaaaaaataaataaataaattgacataacaagactttaaattgaaatgcagaataaagcctttaattttagcaaattctagtgttttgatgagacatttcgtttataagtgctatgtatcataaaaattttgagaaataacaggactcaggaccctggaagattactttttgttgaaaaccactgtggattcttcaggaggaggttatctgtctggaagcagcatcaaaaaactggattgttcttgattattgaaaagcatttatatgtaggattggcagagagttgattgagactttgaaagtttgatttgcttattgatagtccagtgatccctctttgggccgcagtttcccaaggtgataaagatagtaatacctttgtcacaggattattgcaaaggttaaatggactagtgcagtaagtaactggcacagtacctggcacctaacagatgacctgctgaaattcagaggcattggtgttgcaatcttttttttttttttttttttttttgagacggagtctcgctctgtcgcccaggctggagtgcagtggcgcgatctcggctcactgcaagctccgcctcccgggttcacgccattctcctgcctcagcctcccgagtagctgggactacaggcgcccgctaccacgcccggctaattttttgtatttttagtagagacggggtttcaccgtgttagccaggatggtctcgatctcctgacctcgtgatccgcccgcctcggcctcccaaagtgctgggattacaggcgtgagccaccgcgcccggccgcaatctttttttttttgagccagtctcgctctgtcgcccaggctggagtgcagtggcgtgatctcggctcactgcaagctctgcctcctgggttcacgccattctcctgcctcagcctcccaagtagctgggaccacaggcgcccgccaccacacccagctaattttttgtatttttagtagagacggggtttcaccgtgttagccaggatggtttcgatctcctgacctcgtgatctgcccgcctcagcctcctaaagtgctgggattacaggcgtgagccactgcgcccagccggtgttgcagtctttaaaggaaaaggaactgaatgcttgcctttctctacctcccctattagttggtttatagacctttttgtaagtctccaacatgagtgaagcagtggttggatagaatgaatttagagctctatcctgtacttgtaaatctcaggggagagtctgaaagcagtgctagggaaaacagtaagaccattcttcatgaaaaagagtgaacttgtgaaaatgtgtacttaatcagcaagaacatggagtgtcctatataaatagctcagagctgtgtttagctcttgccagtttcaccaggcttagggggcctgccaggaaaatacttgactttctttccagcaaggttatcctagaaaaaatagttttgcatttgctgattcatttctgaaattttccagtgagaagctcatttctgtttagtgccttgggtgtaaacaagccttctggcttgatattttattaggttttatacctttgtgaggagaacagccttcttgtgctaggacacaaaattcttaagttttccttccgtcctagggagtggtcagtgtatatttgtcgttctgaatatagcccttttgcctgttgactaaaccagacccaacatttattcagaagatatttatttgggtgtcacccctggtgtcatgatgcagagggatcaaaacaaacaaggaccatgttctgaaggagtttgcagttgaatggggtagatgggcattgttcagaggatatgccctctaggtcataataacaacccgagaagtactgaaggaaagaaacctggttctgccagggcagtgaacagtggggtgagggaagacttccctgaggaagtctcactcattcattgagaattaatgatgagtgagaattaagtagttgggggcaggaggcatttcagcagagggaacaacctgagtgaaggctctatggcagagaggaaaacagttgttggggaaactgaaagaggccagtgtgtggttggaacattgtacttgagcaaagagagtggagatggagtgggagtgggagaggtaggccaagaccccaacatgcaaggcctggaggtcatggctaggagttttattttttaggtcaaaggcagtgagatgacactgaagagttttaaaccgggaagcaggtgataggatgaccaggtgtattattttggaaaaatcatttggaccactgtgttcagaacatcttaggggaagaccagagggattgccaaggaaccaatgaagagactgtcttagtccattttgtgctgctttaacagaatgctactcactgggcgatttataaagaacagaagtttatttggctcacagtccaagagcatggcactagcatctggccagggtcatcctatggcggaaggcgagagaggaaatgggggttgaactcatctttttatcaggagcacactcatgcagtaacgtattagtccattcatgagggcagagccctcgtgacctaatcacttcttaaaggctccactcttacaccatcacagtggcaattaatttgcagcagagttttggtagggacattcaaaccatcgcaggcagttaccattgttcaggtgagagatattggtggcctggactagtggtgacagtagaaatagagcaaagaaaatgaatttccaacctggttagaagatgaagccaacaaaaccttgtgatggagcgagtaagagcatgggaaagaggattgataagcttgactctccgatttctgactcacccagctgggtggatggtgcctattttttaagatgggaatgtgggaagaggactacatggagtggtggagggaggaagttgatctgagttgggacttggatgtgtggagtttggtctgcctttgagcattcagttggacatgtgaaatgggaagtggccagttgtatgagcctgatgttcataagagaggtctgggcttaagataggaatttgggagtcagcagagtctaggtgggaatgggaagcctggtgagacggtatacagagggagaggcaggaggcctgggcctgagaaccctccaggccttttctggctgggcagaggaggctgagtctgcagacgaaatagagcagagatgggtaagaagcggaggaaagatgaggaaaatatgtggttatgaagcccgaagtcgagaaaatttgagagtgaggtcagtaaggtgaaatgctacagagaggtcaagtgaggtaaagactggaaaaatgcccatcagatttagagacatgtgggtcattggtggccttagcttgagctgttttggtggcatgatggaggtgaaagccagactggcgtgggaggtgaggaaacagacggtgaacatagacaactctttcccgaaggttggctgtgggaggagggagatgtggatgttaaaagtattttgttttttcttttttttaaggtagaagagacttgaacttgtttaaatgtcattggggagggagccagttcaaggagaggtttggtaatgcagaaagaagaaaggacagtgtttcattttttcaacaaatgttgagtgcctgccactctgtgctgaagaattctcagtacttgggaattcagcagtgaacagaacaggcaaagtgtctgttgtcatagagtttatgttctgctggggaaggcagatagtaaatgaactgatatataatatgtcaagggtgataaatactaaaaaaagactaaaaaaatgaattagtaaagtgagagaacaaaccaggtaaggagatacagggtgacaagggggtggcagtattaggtgctgaggaagtcccctgaggaggacatcagagcagagatctgaaggaagtgagggggtgagccatggagatatctggggggagggagggcattcccaggagcaggaatagctcatgcaaaggccccggggcagaaatgtgcttggtgtgttcgagcaagtaggccagggccagggtggtagaaggtgagagcagagggatagcaggggccagatcacatagaggtttggaggccaagatcgagagttttaattttacgcggagtgggatggaaagctactggagcattttgagcaaaggagtgttgtgatctgagttacattttgagggcatccctctggctgctgttgagaaaagctgtggggtggaagggaggataattgctgaagcatggagaccagttacaagaccattgtgatggcccaggtgggagataacagttgcttggcctagggtgatagtggtggcctagtgtggtaagaagggatcaggttctagatattatggatagtgtgaagttcctgagaaggcggatagggatgggaggtgacagaggtggaggggttggacacccactcccttatagcaggagagagcagagagtaggcccgaagtgggtcaggttgtaggtttgctaacagcaagctgagggagtctccttgtgcccacttctaatttctgagtgaagtaggaggccactccattggttgtgagtaaagaggacggcagcagaacagcgatgattgggaggggagagttgggccattgagggtggagaaatgtgcagtagccatcgtggagagtgagaggtgaccaaattactgggcagcatttcaggtttcattcgtggtgggtaattggggctctgtaggcctgccaacctgccctgttgtcagaggtctgcttaggcggagacaggtgaaaaggggacgctagtacaatctaagtttgggattttgccagaagttaagactaaaggtcagagagagtccaggctattgattgcgtgtcatctgataatagtcctgctgatgggatctaccctggaaaatgaggaaaaaggaaagccgagaggttggccatctcaaggtttgacaggacaaagacaggttctactgggagcaattgagagggtcagctggaaggagagaagaggaaggagctggaagttccccagttccatatagggacaagagtcagtgtgaccagcctcaccaggctggcttggagtggaggaggatgtggtaggtgactgggagctaaaggaatttaggggcagcgttggtttctgtgggggaagcctgcgacagatagaagtctgaggagtgtggaagggttactgtgggatctgggggcattggccactgatgggattgttgggcagtgctgggtttgaggttggtgatggtgattgttggacttgccttgggagtggaagagagaatgcgagccagtgtcagaggtgctggtgaatggaggtgtgtgacccgagcggtaacatccagaaaggatttcccgcaaagacagcgcggcttttcagctgcagctgccccaccctgctccagtctccctcatttccagcctggaaattgttgctaattgccccattggcagttgggaaggcaacgcctgttaagatgtggagcaataaagtggagcaggtatgctgtgccgtatgcccctcttcctgcaccgtcctccttctgtcatcgttgagtggctcaggagtgctggccctctaacagactgcctgggcgtggatcctgactgcagagtagcacttctggctgtgacgtgggcagatggcttaacctccctgtgctcagattcctcacctgtaaaacagttaatggatgattagagtgttcctgcctccctgggttgtggtgaggactgaatgagcacctgccactaggaggcaatcagtgagtcagctatcatcattattattattagggttccactcattctccttttcccttggcattgcttgatcccacggagatcccactagagattttgctttaatactgacttgttttaaaataagagcaagagaactgacatttattgaccacctgctgtgtgccagctgccgccttagtcaccaccaagacctctctcatggcggtgtcaagagaattatctgcactcttggtgcctagttatggtctctggagcatgtggggctgttttttatcactcccattttttagaataggaaatcaagattcagggaagttggccgggtgcggtggctcatgcctgtaatcccagcactttggaaggctgaggcgggtgtgtcacctggggtcaggagttcaagaactgcctggccaacatggcgaaaccctgtctctactaaaaatataaaaattaaccgggcatggtggcacgtgcctgtagtcccagctatttgggaggctgaggcaggagaatctcttgaacccaggaggcggaggttgcagtgagccaagaaggcgccactgcactccagcctgggcaacagagtgggacttcatctcaaaaaaaaaaaaaaaaaaaaaaaaagattcagggaagtttaataacccaataacccatctggcatcattcagctaatagatgtctgtgccaggacttgaacccagctctgtctcacacctgtatcttttctttctgccatatcaggctgtgccatgctatctgtgaggcaccctgccacacacactttttcgctgttcctttttctccctccgtttaaaaaaaaaattattacacttttaacttctgggatacatgtgcagaacaagcaggtttgttacataggtgtacgtgtgccatggtggtttgctgcacccatcaacccgtaatctgggttttcagcccagcatgtattaggtatttgtcctaatgctcttccttccccttgcctcccacccctcaacaggccctggtgtgtgatgtgtgcctccctgtgtccatgtgttctcattgttcagctcccacttatgagtgagaacatgtggtgtttggttttctgttcctatgttagtttgctgagaatgatggcttccagcctcatccatgtccctgcaaaggacatgaactcattcttttttatggttgcatagtagtccatggtgtatatgtgccacattttctttatccagtctatcattaatgggcattcgggttggttccaagtctttgctattgtgaatagtgctgcagtaaacatacatgtgcatgtgtctttatagtataatgatttgtaatcctttgggtatatacccagtgatgggattgctgggtcaaatggtattcctcattctagatccttgaggaatcgccacactgtcttccacaatggttgaactaatttacactcccaccaacagtgtaaaagcgttcctatttctccacatcctctccagcatctgttgtttcctgacttgttaatgattgccattctaactggcgtgagatggtatctcgttgtggttttgatttgcatttctctctttttttctttttttattgatcattcttgggtgtttctcgcagggggggatttggcagggtcacaggacaatagtggagggaaggtcagcagataaacaagtgaacaaaggtccctggttttcctaggcagaggaccctgcggccttccgcagtgtttgtgtccctgggtacttgagattagggagtggtgatgactcttaaggagcttgctgccttcaagcatctgtttaacaaagcacatcttgcaccgcccttaatccattcaaccctgagtggatacagcacatgtttcagagagcacagggttgggggtaaggtcacagatcaacaggatcccaaggcagaagaatttttcttagtacagaacaaaatgaaaagtctcccatgtctacctctttctacacagacacggcaaccatccgatttctcaatcttttccccacctttcccccctttctattccacaaaaccgccactgtcatcatggcccgttctcaatgagctgttgggtacaccttgcagacggggtggtggccgggcagaggggctcctcacttcccagtaggggcggccgggcagaggcgcccctcacctcctggacggggcggctagccgggcggggggctgacacccccacctccctcccggacagggcggctggctgggcggggggctgacccccccacctccctcccggacggggcggctggccgggcggggggctgaccccccaacctccctcccggacggggcggctggccgggcagaggagctccttacttcccagtaggggcggccgggcagaggcacccctcacttcccgcatggggcggctggccgggggggggggctgacccccctacctccctcccggacggggcggctggccgggcagaggggctcctcacttcccagtaggggcggccgggcagaggcgcccctcacttcccgcatggggcggctggccgggccgggggctgaacccccacctccctcccggacggggcggctggccgggcggggggctgacccccccacctccctcccggacggggcggctggccgggcagaggggctcctcacttcccagtaggggcggccgggcagaggcgcccctcacctcccggacggggcggctggccgggcggggggctgacccccccacccctgccggacggggcggctggccaggcggggggctgaccccccccacctccctcccggacggggcggctggctgggcggggggctgacccccccacctccctcccggacgaggtggctgccgggtggagatgctcctcacttcccagacggggtggctgctgggcggaggggctcctcacttctcagacggggcggctgccgggcggaggggctcctcacttctcggacggggcggttgccgggcagagggtctcctcacttctctcttttttttttgagacggagtttccctcttgttgcccaggctggagtgcattggcatgatctcagctcactgcgccctttgcctccagggttcaagcagttctcctgcctcagcttcctgagtagctgggactacaggcgtgcaccaccacgcccagctaatttttttatatttttagtagagatggggtttctctatgttggccaggctggttttgaactccctacctcaggtgatctgcctgcctgggcctcccaaagtgctgggattacaggcatgagccaccacatcgggccttgatttacgtttctctaatgaccagagatgatgagctgtttttcatatgttttttggccacataaatgtcttcttttgagaagtgtctgttcatatccttcgcccattttttgttgggattgttcttccctcttttaatggaaaaaaaaaagattgcattatccagatatatcaagaacccaacttttaggttgggccatatgagactactgctatttgagcatttccagcctgggtgagagggtgagactctgtctccaaaacaaaaacaaaaggtgctggtgtgcttcagactgtgccttctctccacctgcacgggctctgtcctgctctaagcccccattgctgctaggctggattattagcagtaacttcctgattggtttccctgcttctgtcctggccaccttcctctttatcctcacagcagccagagtgatctgtccgaagaaaagttgagtcaggccgccctctcccagcccctccatgggcttcctcccatcccttacaaagatgccgttatcatctgggcccctactgggcctagtggagaagacttttcaagagtgtctttctttctttatttcttttttattagatggactccaagtctttttaccatgttgctcaggctggtctgagctcctgagcttaaactgatctgcccacctcagcctcccaaagtgctgggattacaggcgtgagccactgggactggcctcaagatttttttttcttcaacaaaagagtagtttagaaagtgcagcaattcctaattcttgtgggaatacttaagggtaaatttagaaaaccaaagaaaatctgtgaacataggatttgcaactggagtttcttgggtttctgcagttactcttccaggtagcaactctttcctggtcacaggagagggctgctctcttcggtccctgtgccctgcactgctgctgctgccagtcctgtcaacgcttgctcattcccattccaaaaccaggttttacctttgctgtggtcatgccaggccagaaacagactttggagatttcagaaggcttgtaaactagccttcccagctggatgggttcacagagcagtaaaacaccagtgttttgaaccgtggttgtagctttcatggttagtgtcagtgctaggaaaaccacacatttaaactcttctgcatttatggtttacagagtaattccatatgcttgttcgagagtcgaggtatccaggagaacacagactctggagcctgattttctgggtttaagtcccatctccagtacttaataacttgtaacctctgtggatcttgattttcatctataaaatttataatggagtttggccttgaacttcagtcctctggctccttagttctttgttctttggctggacaacatttcgcttatagaaaacttgatgttttgtcctcatagcactgatcacagtccttaaaagccacttttagcccctgcagctacttttctgcagccactgaagcactttctcctcggctcttctccatcccttaaagcaaaattggcaaaccggtagcctcagggctaggcagcttgcaaaccagtcttatttaagccataatattttttaaatatatttttattgatacatatagctgtacatatttttgaggtgcattgataattggatgctttcatatagtcaaatcagggtagctgggatatccatcactttaaatatttattttttctttatattaggaacatttgaattattctttcctagctattttgaaatgtacagttggttaatgttaactgtagtcatcctactgatctaacgaacaccagatcttattttttctatttaacataattttaaaacaattgaaggtgtttgaattacaatcagaggtttcacttaaaatctggatttcgacctctggaaaaatcagaacaactagcacctgtgagctgagggactctaaagattccagtcagctggagctgaggagctgccgcaccccttcctgtactgggtggagagggggtcctgtcattctttgatcttacacccaccgtgttttttcttgacatttcccgtctggcctccatgggcctttgtagttggtgtaacttttgtgtttggtttgttttatgggttttttttgtttgttttttttttttttgagaaagtctcactatgtcacccaggctgaagtgcagtggcaccatctcggctcactgcaattactgcttcccgggttcaagcgattctcctgcctcagcctcctgagtagctggggttacaggtgtgtggtaccacgccctgctaattttcatatttttagtagagatggggtttcaccatgttggtcaggctggtctcaaactcctgacctcgtgatctgcctgcctcggcctcccaaaatgctgggattacaggcatgagccaccgcgcctggcctatagtggcatttcaaaacagattgttttagagctcacagcccagcaccaatgctagcgaagacctcattgctttagataggtttaggacttaaacttgactctaacaaggtaatggtgattggaaggaaaacctacatttgagtttgggcagcagcacccctctggcatgtcacagtgacatatcttgtcacccaagcagagccttggcattatagatacaggtttctaaaagctgatagcttggctgccagcctcatgggctggatcacccacaacttcatgggcctcttctagtggaagctggagcatttccttggtgaattcttttccctgaggggcaagatccatgccacacagctctctgaccctgtgtgtcacaacccttatggtccatgagcaaaatggttgctagtagtcatttgggcatttctcttctgttttcttatgtgtgtaataagatatacaaagtcgggcttgaagattagaaattgctacttccagtgagtcagtttacttggttttcacatcttcaagttgagtctagaatggagttacctaagaaaaggaaatttgcagccttcagtaccgtgtcctggggttgctagaataactagtgccatatccactctactggctctctagagattgtgtaaaggaggctggccttttggagatgatctgaatacatggtattgaggacaaacctccttcccaaggctgatttgataatatgtgagtttgtgggtctaacatgtagaaatacactcaactgagtggatgtggggtaattctgtgtatttagacagggtgttttgttgttttaatggtacgaaaccttgttttcctggaaataacactatctctgagattgtgatttctgaaaaatgacattttattcctataaccctgccaagggtagtgcaacctctgtggttaagattttaaaattaattttaattcaaaaaagtcacacgtgccttagcacaatgtgaatgtacttaatgccattcaactgtaaacttaaaagatggttaagatggtaaattttaggttatgtatattttattataattgttttaaaaagtgctgattaagaaaaagtatgtatgcttatcatagaaaatgtgaaaaaagaaaaaatcatcatcccactacttagacaactttcaatattttattggtttcaatactttgttatattcgtttccagtcttctatgcatatttgcacacagttgagatgttgtgatattaccatgttattgtgtcagctaactgtcatgaacatgcattctgcagaacaagaaacaggtaagaacgtggctgtagagccagaaagcctcggttcaaattctggctccctagttcttgatgtgcaacagtagccaagttacctaacctcctgtgccttggtttcctcatcaaaatcattgcttctcatcaagagcagttttgctcaggagacacttggcaatgtctacagacgtttttggttttcaagatggcagaggggtcaggggtgctcctggtatccagtggatggaggacagggatgctactaaacatcctagagtgcacagggcagcctcataacaaagaattcttcatccccaaatgtcagtggtgccaaggctgagaaatcctcctctaaatgagatggatataataagagtatggacctcataggatcgttgtgagggctaaatgagctaaaacacttacagtaatgcctagccagtcactccatgtaagtgttagctattattattgctgttacaattatttctttcacttcatatcagcatttttgtatttaaacatctcgttaacaatcttttcagtggtctccaaatatcttttagtaaagttttcctttacataaatgttgcattttcctaatgtgttttttcttccttccttaccagatgaaattaaagcagaaatagaaaagcagaggtaagctatagcactacctccttgctgagatacggcatgaagggagtaggtagcaactgggggagcctctttctctgcttggtttctcatatttctaatcctcaggggtggcacacactctgcaagcatggtgctaggcacacggcacaactctgtgtatgtttgaactgatgctaggttcacaggctactgcctcagtacttgtatacttggaaggaaggatcaagatcgaggtaatgctgttgtatcttttcttaacagaacaggcaaagcccttgtctcttgtatggcctgcttccttaggcatgaggacagcttgcaccatgagtggttactcctgatcttcatagtaaggaaggccgttagtcacgtttcagagatatagctctggcgtggctgccaccaggattcagtccaggatgttgttaattcagcatgccaatcagagaacttgctctctgcatgtggcacttcagtggtgtttttgctaatgcatgtattcaacttttaatgcctagccccaggatatagtttgcaggcactttaaattaaatggttgcagatggaatgggaagttagagtaaggtgtagaaaattcatttcttctcccgaccctctcttgcttttctcctaggcttggcactgctgcaccaccaaaggcaaacttcattgaagctgacaagtattttcttccattcgagctagcttgccagtccaagtccccaagggtagtcagcacatcccttgactgcttgcaggtaccatgtttaaacttcgtgttgtcaagggggttctctccaagccacagttggtccttacacagaactatgctggggaccacgctggcactcagtgctgtcagaggcgatgcagaaaggagcagtttaacgtattctttttggagatctcatgagggagggaaaagagaaaggtgtgagctctttagcttaaaaccagaaattttttcccctagaaatatcttatttgttcatgtcttgtgtatgtttttctaaatgaaacctttagcattaattggaatatttgacacacatgggcacataaggcatttttatacagcctcttttttattttttccattttgtagagatgcagtcttgctatgttgcccaggctggtcttacacttctggcctcaagcagtcctaccaccttggctttccaaagtgctgggtttataggcatgagccaccacacctcctggctcagcctttctttcttacttggtttttttttttttttttttttttttttggagatggaggtttgctcttgttgcccagactggagtgcaatggcgcgacctcagctcactgcaacgtctgcttctcgggttcaagggattctcctgcctcagcctcccgagtagctgagattacatgcacccgccaccaagcccggctaattttttgtatttttagtacagatggggtttcactattttggtcaagctggtctcaaaagcctctttcttaatggcgttaaaattcatatcaagtagagaaatagagacagttgaatctgttgtttttggtagttatgtgctataaagtcacctcccatactgaattagcaaacattgaatctttgttcctggaggaactacagggttaggttcctgcaagcctttagtcttcatgtgtttctatttaaagagactatctaatatctattgttgatgcattaacattgaactcaggggccacggtgctataacacatgcctgaacaaagcttatctaacacacataatttctgtgtgaggcacatcaccaccttcttgctgttaggaacactggaaagcacatcagcacaccctcggggtccattgtaaacagcaaaatcaccaacaaaaagcaccaaaatgcaaaaaacacagcactaactacaccactaaaaagatacttgttttcagtaggagagtgaaacaaggaggcatagtgttgccttgtttgacctcaggaacatgaacatcaagtgatttcaaattttttactgctctgtgcatgtctacaaatgaccaaaaaagccccagacgtattgatttgggcttataaataaattttagtgagtaggtgcatttgcaagtatagctgcaaataatgaagactgactgtatttagagtcacaagtaactttgttataaattaccttttactgaagaagaagcaagagtagagaagttaaggtgacttgtccagtaatatacaggtagtacgagaaacaggactataacttgggtttcttaattcctggcccaccattcttgtacttttgctcaggacctactccttaggtttctgattaccccaaagaacatttattctcttttttgtttattttgagtcagggtctcactctgttgcccaggctgtagtgcagtgccttgataatagctcactagagcctctaactcctgggctcaaacagtcctcctgcctcagcctcccaagtagttgggattataggcatgagccaccacacctggctcaaagaacatttattcttgacctcagtgggcagtccacatcaatgaataaagtttaataaaatttaaaaatatgttgaagtgatccacagcttgccaatactttctagaacaggaatggtgaccagattctgtattctgattgctgtgtagaagaggtgtctgaagaggtgtacagctttctcgagaaagagtactgtgattgattggttttatctaccaaggcacaggactgcaaagtggcagtgagcatgccacatttttggcatctctggtctaatatttactctattaatctctcttctttgttacatgtacttgagaattgatgagagtttcttcacggaaacaactcttccaaatgcaaagccattttgttattcagtgtaattctgtacagattgtcctatgtgagacatacagtgagccaagaattgttaaatggcaggcttcagtcctacttctatcctaaaatattttttgctgtgaacgtgttctgaggagatttggcagaatttgaattttagttgttctctccgcatgttaaggttttcttttgaagggagtgctgataatgtaattgacgttctaagaacagtggctgacatgcattgagctcttagcctgtagtgggccctgtgtgcttcattcaccgtaccgtgtgtagtcccctcgacagccctctgaggtacttactcttgtcctcattttagaatcaaggaaaccaaggcttagggaatgaagtgaccagcctagtccaaggtaggctgcagtgcagtggcgcgatcgtggctcactgcaaagtcaagtgattctccccgggctcaagtgattctcccacctcagcctctcaagtagctgggaccacaggcttgcacaaccacacccagataattttatttttatattttttgtagagacagggtttcaccaagttgcccaggctggtctagaactcctaagctcaagtgatcctcccgcctaggcctcccaaagtttggggattacaaacatgagccactgcacccagtgggtttctaggacttcttgactctgtgtctgtgttcttaaccaggggtcatcagctttggcccatgagccaaatctggcctactgtctgcttttgcaaataaagttttattggaacacagctgtcttagtctgcttgggttggtgtaacagaatatcatagactggatgtcttcaacaacaggcatttatttcttacagttttgaaagctaggcagtataagatcaaggtactggctgatttggttcctggtgagggtacactccttctggctgcagacagctgtgttctcacgtgtcatggagagagagctaggtttctggtttcttcttagaggacactaatcctgtcatgagggacctaccctcatgactgcatctaagcctgattatttctcaaaggcccagcctcctaataccatcacattgcaggcttaaggcttcaacatacaaattttagggggacacaaactttcagtctgtagcaacagctatgcccattcgtttatgtattacctgtggctgccttcctgctactgtgacctagcggagtagctgtaaaggagaccaaatgacccgcagagcctaaacatttagtatgtgttcctttatggaaaaaggttgctgctcttaactggcccctgctcttgactgtacccatgtggttctggcctgtttagtaacagaaatcgtttgtttctggaactccttgcatctgagtatgatttcaaacggaaacacaccctgccttgtttcaacccactgtgaatcttgagtcttatggggtatggttatctctctttttagaatggaagttctggctgggtgcagtggctcacgcctgtaatcccagcactttgaggcaggaggatcacttgaggccaggtatttgagaacagcctgggcaacatattgagaccccatctctacaaagtaaagtaaaaataaaaagttagctgggccatgtggtgcacacctttagtcccagttactcagaaggcagaggcaggagaattgcttgggcccaggaggttgaggctgcagtgagccgtgatggtgacacctaactctagcctgagtgacaaagcaagaccctgtctctttaaaaaaaggaaaaacacacagaaaggaatggaagttctctgagatgtaatagattctctgagatgtaataggtacactaggatttctttgtttagtatacaaaatgagtcatcctttttatgacatgagaaagtggctcggtgctccctgggctactgaatggaaaaaatgtacttccccatggtggctgcccttgccaagcctgtttgactggcttttcccagtgtgggcaaggtaacctctgtcttagaaatggaaggccagcatcggggtaaagtttggtttgggcagaattgaaaccagctgcagatacatcagtgctatgccctgccattccttgagcttggcgcagcagtaggagtggcaaaggtgcttctgggattgatttgccataagcacagttagctcaggcttcctctccactgggagaagcctggagacttcccctgcggcttgcttctaccaggtgaaaaagattctgtcttccctttctccagcatttggtctgctacacgcttccccgcagccagggctcagtgtaaggggggttaaggtcagtcttgtctaagctactaagtagtccccaagtttttctggtcacatatcaattttatatatatatatatatatttttattttttatttttttagagaaagataggtattttttagagaaaggaaacacctttcattctgttacctaggctggagtgcagtggcgtgatcaggcttccgaaaaccccgacttccccaggctcaggtgatcctcccatctcagcctcccaagtagctgggaccacgggctaatttttctattttttgtaaaggcaaggttttgccatgttgtccaggctggtcctgaactcctgagcttaagcccaccttggcttcctaaagtgttaggattacaggcgtgagccactgtgcccagccagtttttttggttttttttagagacagggtctcactctgttgtccagactagagtgcagtggcttgatcatagctcactgcagcctcaaactcctggactcatgtaatcctcccacctcagcctcccgagtagctgggactacaggtgtgtgccgccacacccagctagttattttttttactttttgtagagaccggggtcttactttgttgcccaggctggtctcgaactcctggcctcaagtgaataataaaaccatttttgaggatatcctgccaatatattcatatttctttaatttaaaattataggttagggccaggtgcggtagctcatgcctataatcccagcactttgggaggccgagacgggcagattgcctgagctcaggagttcaagaccagcttgggcaacatggtgagaccccatctctgctaaaaatacaaaaaattagctgggtgtggtagcacatgcctataatcccagctacttgggaggctgaggcaggagaatcacttgaacccaggagatggaggttgcagtgagccaggattgtgtcactgcactccagcctgggcaacagagtgagactctgcctccaaaaattaaaataaagttatgggttgggcatgatggttcacgcctataatcccagtgctttgggaggccaaggtggaaggattgcttgagcccaggagtttgagctcaacatagggagacctcatttctacaaaaacctctttatttacacatgttcctgttattaaagtatatatatggccaggcgcagtagctcacgcctgtaatcccagcactttggaaggccgaggcaggtggattgcctgaactcaggagtttaagaccagcctgggcaacatggggtgcctgtactaaaaatacaaaaaattagccaggcatagtggcatgcgcctgtggttccaactactcaggaggctgaggtgggaggatcacttgagcctgggaggcagaggttgcaatgagcagagatcgtgccactgcactccagcctgggtgacagagtgagaccccatctcaaaataaatatataaataaataaattacatatattgtaaagcatacaaaaatacaactttgacaggacaattggaaaaatataaataaaattctaacattttctttttacatcccagtgaaggctgtaggaaaccattaatctaagctgccctgtttataccataaacattatcttttagctcttatttccagaaaacttttgattttttaaatgcacaatgaaaaatcaatttttaattatgtaagttgtacatgactacagtctctgttaaaaggtttttagaactttacagataaaatgaagttccttgggccaccagccccaaacccaattgcctgtttaggtgtatacttttctttcctctctttttttttcaataagtgatatcacttgtacaagtttctctgcagctttttacattcaacaccgttatcaggctctagctatatctctccatgtggatctagtgcattcttttgactggcatatgacgtgtcatgccaccattccatctctcgctcccctgtacagaggcacacacagggttatagtgaacatctctgtgcaagcctccttggagacatgcctcagtttctctggtcagaggtgactctttggattcctatcactgaggcaaagtaaatagaaccaacttcagaagagaccagtgaggtagaagacttaatttgtaccaaatatattcattcatgtgggtgggataacttgtaatacagcttacttaccctaacctctgtttattacagtacagaggtacagtatgtcctattctgtaccaagaaaccaaccgcatagcattttccttcatgcagtgagtcctataaaggcctgttatagtgtattatattgtcatcatcttcccctccatggcagaatgtccctgtgcaagccctgactcatgtgtcagtgggccagctgcctagaggcctccctccctgtccgtcttcccgccgctcattgcgttagcaaggaacaaggtggggacatctacctgggggatagtgggagatagggggcagtatctacaagtcacacacagccctgtaggtcccagttaggactttgagctttggtgcacctccctggagaatatagactctataagaaaaataattacgtttgtcttactattgtatccccagtgcccagaacagggtctgtcacaaagaaggatgagaaagcagaaccagaaagatccacaggatacaggaactctcctttctcctggccttgtctcactgcacagatgaggggggaagtcatgcttaaaaccctttctgatttgaagagtaatgtgccccttaaggagtctggagaggggaggatactttctgtccttttcatactttagttaaagtgcgaaagtcgtaatccatgtccagcctgctttgtggcatcagtattgcagcctacttttcagcattcacatttgaggagttcctagaccaccccacttgcaatccagtgcacaaaacagacttgagtctgttagatgtaagaacaagcaatgtcaaaaccagagctcattttccaggtagacagccctgccctcctaggaagcctgcacctgcagcagcaatgtgaggggtgaggtaaagggcatctggacttgcccttcacaggccacacccctcacctggagatttgggggttggacttgagcagcagagtgtacgcaggcctctctcctgctccttcagttactccatccagtagtattgcatttctactctcagccactctctcaatccatttttctttctgcttgttgagtggtgacacttcactagctaaggaaggggaaaagccattgagaaacggtgtcggacctttgcagagcggccagtcttcctcccacagtggtggctgctctatagataacctcaggaacctgagtccccctggtgggggcagaagcatgtgaccagtagaagccaaaaaggggaaagaacagaacagcagttttaggagtcttcaccaagtcactggaggcagagaatgccttagagttcacatgtatatgtgccagatgagtgattcttttatctgatcaaccatcaatataacgtggatagcttggagaaaaacactgattcctgggctccacctggaagttctgcttcagtaggtctgggtcggagtccaggaacctgtgtttttagtgagctccctcaggtgattatgtttctcagccaggcttagaaatcatcctgctgctgacctttgaggttccttccagctctgtcctccatgctgacatcccggttgtgtgtgaggtggcacagaccaatttgtaacctctcagagagggcacgttccaagcagctgctcgtgggtgacacacactactattgatgtaggtgtgaaatgcagatgaagtttttacattaatttttggggtagaaaatacactgacaggattcaacgttgaaaaaaatgaaaagatgtactacagagtgtcttagtcccaccccagctcacagctacttagttctcctccctcaagcaaccatgttattagtttcttaggtatctttccattgaaagaaaatacatattcatatatatatataattttaacagctttttgagataaaattaacatgcatacaattcatccatttaaagtgtaattcaagccaggcgcggtggctcacatctgtaattccaacactttgagattacaggcaggaggatcgcttgagcccaagagtttgggaccaatctgagcaatatagcaagaccccatctctacaaagaataaagaaaaattagactagcttggtggcatgtgcctgtggtcccagctactcaagaggctgaggtaggaggattgcttgagcctgggaggtggaggcatcagtgagccatgaccgtaccacttcattccagcctaggtaacagaataagaccctgtctaaaaaaaaaaaaaaaaaatatatatatatatatatatatatatatatatatatgtatgtatatacatgcacacacacacacacacacaaaattttgtgatttttagtttattgacagagttgtgcaaccattaccacaacctaactttagaccatttttatgttatcattgacgatcactccctatgtctccctacgccgcccccctaactctagacaaccactaatctctctgtcttgagtatgtgtagctattaattcctcaggcttgcagagatggttgcgtactggggagtgctctataccttgcatttttcatcggatactgtatcaccattccaggcatcttttgctgtcaggcgacaggacgaaggttgcagtcacagagtggttatgcctgcctggctcctggggagcagaggactctgtaggaactggaagtgcctgtcttttgctcttgtgggctgccacggaaggcctcagtcctagccaagcagaaatgtataatctctgttctttctctctttagaaactcatcgcatacgggcacatcactggcaacgcccctgacagtggagcccctgggaagcggctgatcgacagaattgttgaaaccatttgcagttgttttcagggccctcagactgatgaaggggttcagttacaaataattaaggtatgcctatttgtttgcctgtctggtttttaaattagaaagcaagtccctgtgggaatctggatttctaatttactatgtgttagttgtctcaggtggtgctgaggtggaacagaaagatttaagcgtcacttagatcttttgttaggtgtcagaatttattagcgtggactgagacaagaaaaatggaaccaggtgtgttttcaaagtaaactgttcagctaataacaatgtaaatttcttgtgaattaaatcgtcttgaaatcctctggttaaccctggattcccagtctgggtttctcagtgggtctttgttgatattcttatctctgacttgcctctgtcctacttccctgttcgatttctgctgccaggaatggtttggcacagatagtaccatctgcttgtctgagaacaggatcaggacaggtgtagccaaggatccaaatattaagtcctgaaagtattaacattatgaggggagggctccatgctagataaacctttcttaaagctcccttgaaaacccactagggaattgggaaactgaccacatcgaaacgtatattttctgattaatctgggtgagatcacgttggagtgttatatgtcatgagataattgtctgtattattcattttaggtttttcagtcagtatgaaaattcagaagtttggcctttttttttttttttttttttttttgagacatagtcttgctctgtcgcctaggctggagtgcagtggtgcaatctcggctcgctgcaaactccacctcacaggttcaagcagttcttgttcctcatcctcccgagtagctgggactacaggtgtgtgccaccactcctggactatttttatatttttaatagagatggggttttaccatgttggccaggctggtcttgaactcgtgacctcaagtgagccaccctgcctggctggaagtttggctttttaaaaagtgagccagtagaaagcctgcttcaacacaatttaattgtttcgagtgatttggatttcatagaactgttcattgtttttcaactaacagccataggagttggctcttcataataatcacctagtttaatttgcagagccatcttacaatttatttgaaaaaagcacacagaaaagaaaaacaaaaccagaccctctagaaaagtgtggccataggagggcaggaaggtgatgtgcgttcctgatggtgaaggtcgcggatttctattttaggctcttctgactgcagtgacttccccacacattgaaattcatgagggtactatcctgcagacagtgagaacatgttacaatatctatttggccagcaaaaatctcatcaatcaaaccactgccaaggctacccttactcagatgctgaacgtcattttcacccgcatggaaaaccaagtggtgagtgacagcacttacgtgctaggggcaagacatcattgctctctgaactctatcatgtgtgaccttggtgcctgtgaagaatcactagcattttaaagctaccccttcttcctgtggattctctgtactgtgcttttgttcttgctttaaaaatcagagaaactaaagggttttgaaatttgtgttcagaatttgtttggagactgtcaaaggaatttatttccttttaaatatgttatccttttggctggaatttttctttctttctttctttctttttttttttttcttttttctttttttttggagagagggtcttgttctgttatccaagctggagcgcagtgacaggatcatggctcactgcaggcttgaccttcccagctcaagcaatcttcccacctcaacctcccaagtagctgggactacaggcatgtgccaccacacccagctaatttttttattttctatagagacagagtttcaccatgttgcccaggttggtctcgaactcctgggttcaagaattcctgctgcctcagccttccaaagtgctgaaattataggcgttaaccaccgcgcccagcccaggaaattttttaagtaataggctggcataatttttcttccttaccaaaatgctgtatcccccttttgttgccttttagttgcaggaggccagagaactggaaaaaccaatccagtcaaaaccccagtcccctgtgatccaagctgcagcagtatccccaaagttcgttcgtttgaagcacagtcaggcacaaagcaaaccaacaactcccgaaaaaacagatttaaccaacggtgaacatgccaggagtgattctggaaaagtaagcacagaaaatggagacgcacccagagaaagaggctcatcactgtcaggtacgggctgatacggtatggctctttttccaagtgtgagagggaatcagcctgtgaggggcagaagaagtgtatgtcataacatctgaaggaaacctctgataacagcttatctctttctgggcctttccctttgcttttctcttagggaacacaaccagtgaggcatgatgtcaagtgtcccgttgtcagctgtgctgttttctctaaatagtactgggatgtatctagctgctacttcttcatgtcagcctcagtgcaacaggttcaggttgggacacttatctttcagtagttaattgattgggtgattagtcactcagtgtccacaggaggacaagggcttagattctcatgtctacactggatctccatgccttgcccagtgcctagcagtagccactcatagatatccatggaaggagccagaaggtagcaggtggatggacggatagacagatggacagatagctttgttttcttcttctggtgaccatgtacatcacttgtttttgttgggtttttaagtgagagactaacccacacctgattatattcttaaagtaaatgaaatgaaatactggattgagttgttataagatgatacttctgactgttcatatctctccctgggcagtttgtaggaaccagatccaaaattggtattttttcaggaatttcctttcccaagtgattctgtcaaatgcttcttcactcaagcaggttgttctatacaaaatatctgacctgtcttcataactgatctcatttcttcttcagccacattactgataatgatttctgttggtagtatgttccctactggagtgcacatatttgagcaggttttattcctttataatttaccagactgcttgatgtacatgagaacagaccaagtgttgttgctggaatgttgtttggtattcatttactcaaggaaagcacaaaagaaaaaattgccaccaagaatggtgttgtgtctcagggtgagcacggagttgccttctacttacttctgctgtcgagagtcctaaggaaggtgctcagaatcccccggcccaccctctgtgtctgttatcatctttgcctttgtaactctctagggaaaggaccaggtttttactgtaacccttattaagctgtgatcagtcaataaatattaatatttaaatacactgtaataagcatagctgtgcagatataaaaccaagtctctctgacctgcataaaagtgcttccactttagcccattttctgtacagcagccaaagtgatctcttaaaagcgtgaattagagcatgacccctgctcaaacccctttggtaattccccatcctgtgccattctgactgaaatccatgccctgtcctcatagcttatacctctctttctcttttttgctacacagtgcacaggtgccctttctggttattgaacggctgtgcttgtttctccctcagtgcctttgcacttactgtcccttccctgcctctgaaccccttgtatcttcaggtctctcagttcagactgagagaggcttctctgatcaacttctgtagctcctcatcatatctgtcccattatcttttatttttttccatagtacttacaatacctgaaattactgaagggttctgttcacttgttcctgcactgaagcctaggctgccctgctcaccaccatattcccaacacctagaatggtgcctggcacacgcagcagacattgagcaaatacattttttgaatgaatggggaaaaaacgttattgctagaacataattttgtagaaacgcagtaacttgaagttctgctctaacaaagagaaaataatttgctgttagcatgttgctgtggattttgtggccaatacttggtgcatcctgtgagactttcccaggaacatgggaatcagattgcctgggagaagcaaaccccagacctgcaaatagtgggtcagaacggaagtgtgctgttacctttaaaaagagcaagtgggctgggtgccatggcacacacctgtattcccagttacttgggaggttgaggcaagaggatcacttgaggccaggagtttgaggctgcagtgtgtctgtgaatagcctctgtgctccagcctaggcaacaaaacaagaccccctctctaaataaataaacaccccatctctaaatcagtcagtcaatcttaaaggagcaaatgacttccagttctcaggactaggctctaaagaaagaacaggtccttcagaagagggagttgaacaagggagacacgtacccaggggcggagtccaggcatcaaggcccagtgaaaggcctgagctctagtgcctctgtggctattatttttacatattactaaagtgcatggatgttggacacaaccatggggctctcccacagactgtcctgtagtaatcaccatcacatggccaaccctaactggacactcactgtactgctgacttggcattcaacataatgttttccaatttaattaactgggaatcccccccacagccttcctaggataatttgcctcccatgttatttgtgtagatgaagagaattcaccaatagacctggacatctgtggtggctcacgcctccaatcccagcactttgggaggccaaggcaggcgggccacttgaggccaggagttaaagtttgtttttaggattctgacttttaactcccagcatcagacatcagtgtgtgtacatttttacagatactgtgtagaattacctatgtgtttgtgtggatttcttagctcactttttgcatctttttttttgagaatgagtctcgccatcttgcccaggctgtagtgcagtggtgagatcttggctcactgcaacctctgcctctgcctcccaggttcaagtgattcccctgcctcagcctcccgagtagctgggaccacaggctcacaccaccacgtctggctaattttgtattttttagtagaaacggagtttcaccatgttggccaggctgatctcgaactcctgacctcaggtgatccacccgtctcggcctcccaaagtaatgggattacaggcgtgagccaccacgcccaaccaggatctttgttttagacagcaatatgttccaaatgcctggaactgtgccggacacatacacactcagtttgttgattgaatgaatcttaccgccccaccatcccccatgctccctatttaactggacagagaacagggatgtggggaggccttatctcagactcctcccattttttccccgttattcttagcatgtgacttctatccttagggtcatcttatggctcaggatcctgtcattttgttccaggtaggaagaaagaggaagagataggactgaagaactctgccagctgagtcaccccccttctaaagaggagtcttctggagcttgttgccaaccctgataacttatgcttacccctcattggctataacttcatcacatgatcaccctttctgcaagaaaggctgagaaatgtaggcacattccctcccaaaacaaaattcaggatctgttaggaaggatatgagttagagaactggcagtgcctgccacagagtgttctccagctggctagggagggaatggcagcaaggtttctcctatgtgagcctattcaaggtggccctcttattttgcttcggggcagagtctgaaacagatagggtctggtgcctaatcagtagtggtggtgatatcccagggaagagcagaaccagtggtttttaagtagattctttgtacctctcaaaggtttgatttgatttaattatcaaacactttcacagcatgcttgaaacttagatacaatggacttagtagtggttatcacaacatccagaaaagcctcttctgagacctatccaaggctgtcatgtcagcaggggaagcagtccacagttactgggtggagtcttcctgctttggggcctctactgggatttttccttagcagctccctcttcaggaaccttctgctggtattcgggctttctgactctccttagctcttcctggcctgagaatgttttgattttgcataagtactattatggatcctgcctattaaggaatatgagttatatactctatccctccaaaaaacgttgctcttgatgctgtttaaatggaaaaactgcagtgagggaaagaggagatccatgctgatgtgaaattttgtttttctccttaggaatgaaagatagtgaaggttttaactaactggaactacttgcagtgtgattcgttggaaattttcattatggatttagtctgcagggccaggcgggtgacagaaatgagcaggcttctatcatgaggacatcataaatgtcttcacacaagcacctacatataaacacacaggcctaataaaaagtagcatttgagagctcacttttttcaggcactgttttaaatgctttatgtgtatcattctcacagggctttgtttactggtaaggaaactgaggcttggggaggttaagtaacttaagtccccacagtgggaagtggcagagcagggacccggaccaggcatgcaggctccagagccctcgctgttattcatcatgctgaattcacttctacaagggaacattttttctctgatgttcttttttttttttttgagacggagtctcgctctgtcgcccaggctggagtgcagtggcacaatctcggctcactgcaagctccgcctcctgggttcacgccattctcctgcctcagcctcccgagtagctgggactacaggagcccgccactacgcctggctaattttttttttttgtatttttagtagagatggtgtttcaccgcgctagccaggatggtctcgatctcctgacctcgtgatctgcccacctcggcttcccaaagtgctgggattacaggtgtgagccaccgtgcccagccttctctgatgttcttaaaacaccctgcccagtcagcctcccattttctctgctcttgacagacatgttactttcctgcttactgtgtagtaacaacagtggtccaagtgtgatggcacctcgcatttggccccaagggaagggagtcgattgggagtggtgaggactgaggcaacagggtatcagctgagttcatgccctggctgaagagggcagcttcacctggttccagccagttgtggcccagtgttgccacatagttgggttttttaaatagaagcccattctggtttttgtgagtagtctcctggtttttaaatgttggcagctaattcagaagttttaaaaagcagcacataggctaagcaatacatatgtacaggcagaggtacttgccagtcaccactctatagcctctggtctaactcactgaggctgtagcttctttgataaaatgagttgatatttcttgggtgttgaatgtaaatgaggtgctgtgtactttggaatgtatgatacagattggaaactgtcaccataattttattaatatcatagcatcagagaaggttgggactggaaaggaacttggaaatatctagtcatatgttttccaaattacaagaggtgagatgtcatgataagtgaacccttccttccctccttccttccctccctccctcccttcttccttccctccgtccctccttccctccctccctcccttcttctctccttctcttttcctccctccctccttccttccctcctttccaccctccctctttccctccctccctctgtccctccttccttccctccctccctccctccttccttccctccctccctctttccctccttccctccttccttccttccattttgagacaggttctcactctgtcacccaggctggagtgcagtggcgcaatctcaaatcactgcaacctctgcctctcaggctcaagtgatcctcctgactcagcctcccgaggagctgggactacaggtgtgccctgctgatttttatactttttgtagagatggggttttgctgtgttgtccaagctagtctcaaactcctaagttcaggtgatcctccccacctcaacctcccaaagtgctgggattacaggcatgagccaccatgccccaccagaacgttttatattttaatggttatttattttaatatgcattcagaaaatataactaatgtatgaaaactgttattttgtgaattttattgcttaaggtgagttaaagagcactagtaaatactcgcagtcatgcattgcttaacaacagggatacgttctgagaaatgagtcataggcagtttcactgttttgcgaaagaatattatgggtatacttacacaaacctagatggtatagcctactacataccatatgtatagcttgttggtatgggcatatggtatagcctattgctcctaggctataaacctgtacaccatgttactgtattgaatactgtacgctttggtaacacagtggtaagtatttgaaaaagtacagtcacaatgcagtacaaaagataaaaactgatatacctgtatggggcacttaccatggatggagcttgcaggactggaagttactccagtgagtcagtgagtgagcagtgagtgaatgtgaaggcctgggacatgaccgtatgccactgcaggctttataaacactgtacacttaggctaccctaaatttataaaaataattttcttttttttttttgagaccgagttttgctcctgtcgcctaggctggagtgcagtggcacgatcactgctcactgcaacctccacctcccaggttcaagtgattctcctgcctcagcctcccgagtagctgggattacaggtgcccgctaccacacctggctaatttttgtatttttggtagagactgggtttctgttgttgaccaggctggtctcgaactccagatctcaggtgatccacccgccttggcctcccaaagtgctgggattacaggcatgagccactgtgcccagcctataaaattaattttctggctgggcgcggtggcttatgcctgtaatcccagcattttgggaggccgaggcaggcagatcacgaggtcaagagatcgagaccatcctggccaacatagtgaaaccccttctctactaaaaatacaaaaattagctgggcatggtggtgcacacctgtagtcccagctactcaggaggctgaggcaggagaatctcttgaacccgggaggcggaggttgcagtgaaccgagattgtgccactgcactcgaccctggcaacagagcgagactctgtctcaaaatataataataataataataataataataattttctttattcaataataaattaattttagcttactgtaacatttttaccttataaacaattttttttaactttttggctcttgtaatagcacctagtttaaaacaaacacatggtacagatgcacaaaaatattttttctttatattcttattctatacttttttttctatttcttaaatttttaggtttttaaaactttaaaattatttttgttaaaaactaagccacaaaacacacagattagcctaggcctgcacagggtcaggatcattcatatcactgtcttccacctccacatcttgtcccttggaaggtcttcaggggcaataacacacatgaagttggtatctcctataataacaatactttcttccggaatgcctcctgaacctgcctgagacttttttacagctaactttttcttttttaaataagtagaaggcaatgacaataaagagtatagtataggctgagcacggtggctcacacctgtaatcccaacactttgggaggctgaggcaggcagatcacttgaggtcaggagtttgaggccagcctggccaacatggcaaaaccctgtctctactaaaaatacaaaaattagctgggtgtggtggcagacgcctataatcccagttactcaggaggctgaggcaggagaattgcttgaacctgggaggcggaggttgcagtgagccaagatcgtgtcactgcactccaacctgggcaacagagtgagactctctcaaaaaaaaaaaaaaagtataataaatacataaactagccgggcgcagtggctcatgcctgtcatcccagcactttgggaggccgaggtgggtggatcacctgaggctgggagttcaagactagcctgaccaacatggagaaaccctatctctgctaaaaatacaaaaaattagctgggcgtggtggctcatgcctgtaatcccagctgctcaggaggctgagacaggagaattgcttgaacctgggaggcggaggctgtagtgagctgggattgctccattgcactccagcctgggcaacaagagtgaaactccgtctcaaataataaataaaaaataaataaataacaaactaataacatagtggtttattaccaattattatgtactatacagaactgcatgtgctattcttttatatgactggtagcacagtaggtttgttcacaccagcatcaccacgaatataagtaataagttgtgctgtgacataatgacggctatgatgtcactagacgataggaatttttcagctccatttgtaatcttcctggaccactattgtatatgtggttcctcattgaccaaacgttgttatgtggtgcataacagtatatttaaaatacataataatatataatattatagtggtgcatgaatgtggcaaaagccatgaaggtggtttgagaatgactaaagtttgagtaacagtgatctagtctaaatcatcctttttagatgaagaagtgagtttagcaattgtgactgtttctggggttttctaatttcaagttccctttgccttctaggaaaagcttataacatcagtatttcccacacgaatttactttgccacgtagatagttccagagtgttaagtgcccagtggaaatgaaaatacttagcactgccctccgggaccttatagatcaagcatagaactcataaaaatggtggctgggttgaaaattctcattaatacacagtcaaaggattattttggttttgcttttttaaggtgatggcttttttggtcaacgtgatgttttataaatgagtaatgttaggccaggtacaatggctcacgcttgtaatcccagcactttgcgatgccaaggtggtagatcacttgaactcaggagttcaagaccagcctaggcaacatagagaaacctcatctctactaaaactacaaaaattagccgggcgtggtgaggaggcgggaggattgcttgagccaaggaggtggaggttgcagtaagctgggatggtgccattgcactccagcctgggcaagacagcaaaactctgtctcaaaaaaaaaaaaaagtaatgtttacttctaaatatctggtcaagaactgtttactttacgtaagctctttcccagagctagttttctgcggcggggggagtaagagatactgaacctcttctacttaaacagttaacattttacagaataatttcataaaagtttagtaaatccttaactatcacattggaaatctcatgccagattctgggtttacagtgtgagaaggcgaagcagcagaaggcatgtcatttaccaaggctcgttggtccccgaggctaaggcacaagagaaagctccatttgttctgccaggaactctggctggataaaatcgagctcctgcctccaagttgggggtggtggggagggccctgggccgagccactgggacttaggaaggaagagagtagtataagccagtggggttttagtgttccacaaagggaacctcaaaagcagaacagatgctgcctaagtttccagatttcaaggaagttgtcctccattgacacaatcagatttggccttggggagaacttatttgcaccctttgccttctgaaatgtaactccccataatctccttttcctctcttcctttgtttttcctgaaaatgcccacgtgtgttttgtatatttggatgtgtgtgtagggactgatgacggagcccaggaggtggtgaaggacatcttggaagatgtagtcacatctgccattaaaggtaagaaccaaggacaacccagcctttcctcttccctcattcctccaaaaagtcctcagcaaaatattttagtggtggagtttcctcttccctgccctaagaactggtggagctcatggaaactgaatcttcccacgtctgcccatcttttatatgggattcaaaaatgacttgtttttactgactgattttagtctcatttgggttgggtttaggaaacatagtctgggccaggcgcggtggctcatgcctgtaatcccagctctttgggaggccaaggcgggcggttcacgaggtcaggagttcaagaccagcccagccaatatggtgaaaccctgtctactaaaaatacaaaaagtagccgggcgtggtggcgcacgcctgtagtcccagctattcgggaggctgaggcaggagaattgcttgaacctggatggtggaggttgcagtgagccgagaacgcaccactgcacttcagcctgggtgacagagcgagactccatctcaaaaaaaagacacatagtctgactgtgttaggcttagatgctccacatagagatgccaagggccattccatatgccttgtagattaggggatgtccaggtttttctaggagtgggctggagccctgagatccatgtccattggagctgagttttcatggccagccattgatgtgtcaaggggacagtccacatgtcagcaggtatcaggtgtacagggaagctttgttttgttaggcttcattcataagtgcctcatggtatggtttcagtggaattaaacttgtatggctcagaatgactgttagatgatcttttttctttgtttctgcccaaaatctcaggtcagtgggtatatgttgaacactttgttccaatgccagtaaattatgaatttgtccagaaatcaaaatcttaatgggttttcatcagcttttttttaaatgaaagagagtaaaatgaaacagagtacaaatgatctgactgtatcacatataatgttaagtattgtttcatgaaatgtgtttcagttacttatgtgcccatgtctatactgggatacagttttataaattaatttcttacagaggtcaagatttgaaagccacttttctaagccctatctttttgtttaggtaccacaaagctatatacatattctattatttatttaacttcttatagaaatgcctgtaaaatagaaaaattttatttcatacctttagatttgtttctgggatctatacaagaagtcatcacataatggatgtttgtcttgtttactttgtgtcctccagccgctactgcagagcctggtacataattggcacttgataaatatttattgaatgaaatatgctttgtagggctattattgaaaattgttctcattgtttcatgtccctttatagaaccacattataaatttttcttagagtttcattgctctgctgatcatcagatatgctttccttcattaaatgatgaaatctgtgtaattctttattttaattcccttttttcacatggctgccaagaagctcaggtttacattttttctctgtgactaaggttttctgtcataactggctcttctctaattcctttattaatggtactttaaaaaaatctgtacctttcatgtttagctgcttctaatctttttcaaaagtgaatgggggtgggtagggctgctgcattgcacagttctggaggcaccattgatctggagagaattgtatattgctgtggccctggcagtggggctgtggataacaaacactcgtaaggcttaagcatcactttggccaaggcttttccaggattatgtcagtcatgggctggtggcacaggaaaaggggaaaaagcaacagctgggaggttcacagataacttctttttggtgtcaggcagccctttagggtaagtacagtactaatttggctatgactttgtacttgtgttttaagaagcagcggaaaagcatggtctgacagaacctgagagagttctaggtgaactggagtgccaggaatgtgctattcccccaggagttgatgaaaactcacagaccaacgggatagccgatgacaggcagtccttgtcgtcagcagataatctggtatgttggtgatcatcctctgtggacttattgccatttttactttttcaaaagatgcagaattaagtctttcctcaaaagaagcaactaaaataagcaagccctgttcctttattagtcacacagtcctgggctgatattctttgtattagcaggttcagttcttagaacgtgctaatgttgcttggtatataacatcattattaaaccctgtttactcagacttctaatacttaaatttcttgccacttttcttctctctcaaaatagtatacattcattatagaaaaataaaatatatagttacccgtctttccttctctgtattgaaaagtcagtatgactgtattgaaagccatccataacccatagattgcccttgttaacatcttacttaaatccatctagatttttctccatctcacgtatttttccacttaaatagaataatacagtatgtatcctgtgttgcaacctgctttttaaacaatttatattatgaacattctctcaggcccatagatatgtctgccacattatatttttaaatagccttactgttctcttaaaagttgctttaaaattaaatataaacattcaaaataggaagtaatatgatgtgagtgtccctctagaccccattttctttgtctttttaccagtgtttctcaatctttttcattattgccccttcctccaagaaaactttgtagacattttttcctaatcatcattccccattaagttgtaatgccagcaataaactggatatccatatgctacatgtatatctgtgctttatacataaaaataataagggtttgttgttcttgttgtttgtttgagacacagtctcactctcacctaggctagagtgcagtggtgtgatctcgactcactgcagccttcacttcctgggctcaaatgatcctgccacttcagccccctgagtatctgggactacaggcatgcaccaccatacctggctaattttttattattatttgtagagacatggtctcactatattgcccagggtgatcttgaactaggctcaagcaatctgcccacctcagcttcccaaagtgctgggtttacaggcttgagccactgtatccaaccagaataatgtttttttccccccttgaggatgcgcttaaatctatacaagggactcgtgttatatgctaagctgcaatttgctttgtttactcaacactatatgatgggcatcttcccctgtcagtatatgtagagctaacagaaatttttaatggccatgtaaaattctgtatggatcactgtaatctattaaccaattccctattgggtttttagattattccagttttatcataggaaatggttctataatgaatatccttatagataactcttaattctttcttaggaataaatgcctgcaagtagtattgatggttcaagagttggaagttttagctgagtgtaatagcatgcttctgtattcccagctactcaggaggctgaggctggaggatcgcttgagcccagaagtctagccaggggaacatagcgagaccccatctcataaataaataactgtagcaagatcatgtctcataagtaaatgaatgaaagagagtgggagttggaagtgttaaggcttttgacatttaacaccaagtcagtcttctgggaaggtactacttgaatacctgtccacctttaatctctcaatacccattttcccattccctcattaaaactaggcagcagcctttattcaaatctttgctagtctgataggagaaagctcctactctaatgatgagtaataaggtcatttagatttctttatcatttgcatctattggtacattgcttatccatgttgttttcattttggaggaaggttttcatatttccttaatgaattatgagaacttttatatgtgggggatattaatctttattatatgtttttaaaatttttattttatttttttgagttggagtctcgctctgttgcccaggctggagtgcagtggcgcaatcttggctcactgcaagctctgcctcccaggttcatgccattctcctgccttagcctcttgagtagctgggactacaggtgcccaccaccacgcctggctaattttttgtatttttagtagagacggggtttcaccgtgttagccaggatgatctcgatctcctgacctcgtgattcgcccgcctcagcctcccaaagtgctgggattacaggcgtgagccaccgtgcctggccaaaaaattttatttttatgttttgcttttaaatgtaatttaccttttttttaggtgaaaaaagtttatttcgtaatacctatactttgttacccgtttatcctgcaatagttgcaatagtattcttttttttactttttttttttggtcacccaggctggagtgcagtgccgcgatctcggctcactgcaacctttacctcccaggttcaagcgattctcctgtcttagcctcccaagaagctgggattagcagagatgaggtttcactatgttggccaagttggtctggaactccttacctgaactgatctgcccaccttggcctcccaaagtgttgggattacaggcgtgagccattcatcgcacctggcttacaatagtattcttagaaatatctttcttacccaagctagtataattacctgtattagttttggtttttttacagcttaacttttgatcatttttcattttaaaccacccataccaactctgaagaacaaggaacaaggttgtagaattgctgtgatggcttctccatagctcctattttgtcatatccttccctcccccacatccctcatctctctattaaatagaagaatttgaatttccaagagataattacatttctaatttttgataagagttagcttttgttttgtcctctccctttttattttttgagatacggtctcactatgttccccagattggagtgcaatggtgccatcatggcttactgcagccttgacctcctcggctcagtggatcctcctgcctcagcctctggagtagctgggactacaggtgggtgccaccacacccagctgatgtttgtttctgatcctaggaatcggatgcacaaggacatcaagtggctgccaggttctcccacgttctgcagaaggatgccttccttgtgttccgctccctgtgcaagctgtccatgaaaccccttggtgaaggccctccagacccaaagtaagcagacagcagttcttggccaccttcagtccaatgatccagcagcacatggtactgtgtttcacacttcccttgttccaagaagtttcagtgtcatgtctctttgtcagtgtaagtgcaggaacggttttacaacttttcagactcatgcagtctctagagtcctttcatatggaattgtctctgtatccccaccaaccaagattttgcccagttttgcttttcttggcatatgaatgctaaaaaagtctgtttattgaacacataaaaaacacatttttactagctagtggattgaatctcttgatgtggggtgtggagggacaggatgcctgcaaacctcagttccctgttctgttggaaacctctgcttcatcgatacagatgtaagccccagattcgacacagggaagccaaacatttctttgtagtaaacaaactactacaaggatgtcagcgctgtggagtgaagaaagcagaggcttcagagccagagagagctgcatttagatcttggatcctccacttgagagcagttccttggctatatgacttgccaagcctcatctgaaaaatgggaatatggaaaatcatcttacaggattgattaaatgaaatatcggtgttgtcctgagcatggggccttgtactttataaattatctctattgttcctgtcattagtcattaataataatcctcaattcatctattactaatgctgctaatactgtgataggtattaggaaaataggctgggtgcggtggctcacacctataatcccagcactctgggaggccaaggcgggtggatcacttgaggccaggagttcgagaccagcctggccaacaagatgaaaccccacttctactaaaaatacaaaaattagctgggtatgctagtacatgcctgtaatcccagccactcgggaagctgaggcaagagaatcgcttgaacccaggaggcagaggttgcagtgagctgagatcgtgtcactgaactctagcctgggcaacagagcaacaataaattttaaaaaataaaaataggccgggcgcggtagctcacgcctgtaatcccagcactttgggaggccgaggcgggcggatcatgaggtcaagagatcgagaccatcctggccaacatggtgaaaccccatctctactaaaaatacaaaaaattagccgggcatggtggcaggcgcctgtaatcccagctactctggaggctgaggcaggagaatcgcttgaacccaggagacggaggttgcagtgagccgagatttgtgccattgcactccagcctggacaaaaagagcaaaactccgtctcaaaaaaataaataaataaataaaataaaataaaaataagtgttaagaaaatagttcatgaaaatgtaccatttcttaccatacctgaactccggcatgggcagtggggagggagggctgtgaggtaggtggataaagagcgccatcttcatggtgtgtgaaacagagtgagccaggtgtctcagcctcccacaagtgatgtaaagtcattgattcttgcagtacagttgcagaactcgctctccagaatcagttgacactttgctcctgctgtattctctactttgtgatggaaagagacaaataggagttggcagctcttgttctcaaagggcctgcgattccagaaggacccaactcatgccatctgccctcattctcctgacatttaggtgctattaattctttaaaattctactcattggtaaaggagcaaggccttctcaagaaacatactgtttgacattttttcttttagcactgttgtggtttttcattttctttgccagatcccatgagctgcgttccaaggtggtttccctgcagctgctcctctctgtgttgcaaaatgctggccccgtattcaggactcacgagatgttcatcaatgcaatcaagcaatatctctgtgtggccttgtccaaaaacggcgtctcttcagtgcctgatgtctttgagctctctcttgccatttttcttactcttctttcaaactttaaaatgcacttgaaaatgcagatagaggtacggattccaaagttttttcatttcattatttactattattattagtcattaattataatactcaatattgagaatgctgctaatattacactaagcattaggaaaatggttcatgaaaatgtttcatatcttaccatcctggaactcagaagtgggcaggggcagggagggtaaatggcatattcatcggctggcaccccagtaaatcagaactttttgaatgagtaagagaatatctttttataaaaagttactgcccccagcctgggcgccatggctcacgcctgtaatcccagcactttgggaagctgaggcgggcggatcatgaggtcaggagatcgagaccatcctggctaacatggtgaaaccccgtctctactaaaaatacaaaaaattagccaggcgtggtggcaggcgcctgtagtcccagctactcgggaggctgaggcaggagaatggcatgaacccgggaggcggagcttgcagtgagccaagattgcaccactgcactccagcctgggcaacagggcgagactccatctcaaaaaaaaaaagttactgcccccggatcttatgtgcctttcattttaaccaatatggtctgtctgctgggctcagccccctaaacatatctgtttggtctgtaaattgtttgaaatcatttagattagtcgccaaattgagaaatcctattttacatgaaaatccagatttctggtttctctccaaaaagtcacagtatgggtcctgcatttccacttggcagctccccagtgggccccaccctgccagccgtccccaccaaggccagggtcccgttgctgcccagccaggtgggcactccactcttcttctgcccagggtgctttacttactgcacgactgggttggctgctgaagactttggaggttttgagccctggttgaaactgttaattagtgtcctcctttgtctttatgtcatataggtctttttcaaagagattttcctgaacattttagaaacatcaacaagttcttttgagcacaggtggatggtcattcagactctgacgaggatctgtgcaggtatttccacctggggacactcatccactggacttctgatgctttaatttgccacagctcagattaagacttctaacccctccttttagagttttaaaggattggcaataaaaggctaattctaacctagtcctgccccacctctccttttttagaggatgaccaacttaggctggtttgccaaggacttcctggttttagcactaaaagtctcatgtcccagaaaccccctaatctcgtcaaactgggacacttggttacgttacctacaagctgagtactgttaatcacaggacctaagatactggtgctgccaatttttgattgggtgctacggtaaatgtggatttaccttacactatacaattgtgtggcctcaaagtaagcatcctgcttgtctggcatcaaatgtaattttgtaagagtgacacaactttaagaggtgggtcaggcaattgttaaccccttccttgatgagaaaattgaggcttggatgggtggaatgaactgcctgagatttcaatttgctcagaagcaggcctaaaaacaacctcctgtcttccagcttcctagtacttccaacatgtgtttcctgagtgagatgtggccaccggagtctgtagttcactggggaaatttgttggcaaacatcttgtttgataagaaaacctaactgctatttgatcagaatttctgatacttgtatgttattttccaagatgcccagtgtgttgtggatatttatgtcaactacgactgtgatttaaatgctgctaacatttttgagcgccttgtaaatgatttatccaaaattgctcagggaagaagtggacatgagctgggaatgacacctctgcaggtaaaaacactgtggacactcaattatattaaagtttattcattccaataaacatttattgagtgccaccacatgccaggcactgtccttgatacagcagtgaacaaaacaggaatgcatattcacacacttcctgccatcatgaaacgacattaaagaagtcagttcagatgatcataggggctgcagagaaaaataaagcagggacggcagagaggaagtgctgaaggtggggtgctgtaattcttaatggggccattagggtagtatcccttagaaggtgacctttgagctgagacccataggaagcaaattcattctcagtcacccttccaaagatagcgtggaaaacaggatcccagtctgcaataggggcaaaggagattggctagtagcagaatacctcattagagcacctacaaagaaaataggatgcttaactgtaggtttctgaatgaactggtcagagggtctccgagctccctggaattgtgtgtagaattttggtatatgggcatttttcctaaaagatggtcatagttgtcattagaatcacagagatctatgctgtccgagttgctgttttgaatctaaaatatttgcaatttttttagatgatctgcaactcatattcaacttgttatttaagaatgctgtttatttttgaaaatcagtatttttatttacttaaagggtgagccttaaaattgaatgcatttgtgggtatttaggggatacgttgtatccagagtcacttacagcataattcaaggttcttttctcctttttttcagtcactggttgagaccttgttatttattatttgagtgtgaatttttttttttttttttttttttttgagacagaatctcactctgtcacccaggctggagtgcagtggcgcgatctcagctcactgcaacctccacctcccaggttcaagtgattctcctgcctcagcctcctgagtggcagggattacaggtgcctgccaccacacccggctgatttgagatggggtttcaccatattgtccaggctggtcttgaactccttacctcaggtggtccacccacctcagcctcccagagtgctgggattacaggcgtgagccacagcgcctgcccaagatcttgttatttttttaaaaatagaaaaatttaaaatttttttttaatcacataagcaatgaatgaaaacttcttttgaaaatccaaataacattgttcattttaggaaaacacatatcccatatttttgctgctggggtgtttataatgagcacctttagagatgtccagggcttttgcaatgtatccttgatacttgtcacttcttagctctgggtttgtttcattcttaatagcactgactgtcagtgatttctttcttagcctcactggggtcccagaaagcctcgtagatgtctgttctcttcatttttctgttaagtctctttcctgtgtgacttcgtcccttaggagctcagcctgaggaagaaaggcctggagtgcctcgtgtccattctcaagtgcatggtggagtggagcaaagacctgtatgtgaatcccaaccaccagaccagcctcggtgagacagcattgctgccacacccacctccattcataataggctcctacgactgctaggaacagttgtcttagtatagttgtcttagaattgaaaaagcctttttagtttgctaaatacctatattattttgaaagtcctgctttttattgcatctggagttgtgtgaagttatgctgtaacttcattgtttcaaatacagagccagttgctctagtgcctttttagtagttgttcattccctcactgattcaaagcatcacctttatgatataccacattttcctatgtacgtaagtctgtttctggagttttaatttttttaaagagacagagtctgtttccattacccggctggaatacagtggtgcaatcatagctcactgcagccttaaactcctgggctcaagcgatcctcccacctcagcctcccaaagctctgggattacagacgtgagccactgtgcctggccttctttctggattttctattctgttctgtttatttgtctgttttaacaccagtaccacacttgtttttggtatcttgtagggcaagtcctcctattcgttgttctttaagttgtcttgatctttttttgccttttttactctttcatgtgaattttagaattagctcatcaaggctgggcacggcagatcatgcctgtaaccccagcactttgggaggtcgagggtggtggatcacgaggtcaggtgttcaagaccagcctggccaacatagtgaaaccctgtctctactaaaaatacaaaaaattagccgggtgtggtggcaggcgcctgtaatcccaggtgctctggaggctgaggcaggagaacagcttgaacctgtgaggtggaggttgcactgagccgagatcgtgccactgcactccagccagggtgacagtgcgagactccatctcaaaaaaaaaaaagaattagctcatcaagtttcatgaggaaacaagtttttaagtaaagtatctgaatgatactaaggtttcatgcttataatccttatagtattgacttgttgctattacaggtttgggaaagggagccgtgcagccagacctagctcggctgtgtctgtgtcccacttgcttatttggcttcctttacttttgtttctccgcaggtcaggagaggctcacggatcaggaaataggggatgggaaaggccttgacatggcaagacggtgtagtgtgacgtccatggagtccacagtgtcctcggggacccagacaactgttcaggatgaccctgagcaatttgaggtcatcaagcaacaaaaagaaatcattgaacacggcatcgagctgtgagtggggctgccgttaactagcagggattctagcaaagccatattttctctgggaacctggaactgattcctaaaaaggaaatgcctgtttacaaaaggctggtgctggcacttgtagctaagcctgattgagccaggcaatcagtaaatgagcgtatgtgtgtgtgtctgtgcacacagagagagaaaactttaatacctttgtgtggttgatgcagccttttttccccccttttctaatgaaaataataaaaccaatttagaaaatacagaaaagtataaagtaagaatgtaaaaatcactcataaaattactgcctgagatggcccggcgcagtggctcacgcctgtaatcccagcactttaggaggctgaggcaggtggatcatgaggtcaggagatcaagaccatcctggctaacacggtgaacccctgtctctactaaaaatacaaaaaattagccgggcgtggtggcgggtgcctgtagtcccagctactcgggaggctgaggcaggagaatggcgtgaacctgggaggcggagcttgcagtgagcagagattgcgccactgcactccagcctgggtgacagagtgagactccatctcaacaacaacaaaaaattactgcctgagggaatcaccattggtgcatttttttccaactatatattacatgaaaaatttcagcataccaaaacattactgtttgtcttatttgttttatttttttaggcattttattttattttattttattttattttattttattttattttatgttgttttcttatactttaagttctagggtacgtgtgcacaacgtgcaggtttgttacataggtatacatgtgccatgttggtttgctgcacccattaactcgtcatttacattaggtattactcctaatgctatccctccccctgcgccccaccccatagcaggcccccctgtgtgtgatattccccgccctgtgtctgagtgttctcattgtttggtacccacctatgagtgaaaacgtggtgtttggttttctgtccttgtgatagtttgctcagaatgatggtttccagcttcatccatgtccctgcaaaggacatgaactcatcctttcttatgaggcatagtattccatggtgtatatgtgccacattttcttaatccagtctacaattgatggacatttgggttgattccaagtttttgctactgtgaatagtgccgcaataaacatacgtgtgcatgtgtctttatagtagcatgatgtataatcctttgggtatatacccagtaatgggatcgctgagtcaaatgctatttctagttctagatccttaaggaatcaccacactgtcttccacaatggttggactagtttacattcccaccaacagtgtaaaagcgttcctatttctccacatcctctccagcatctgttgtttcctgactttttaatgatcgccattctaactggtgtgagatggtatcgcattgtggtttggatttgcatttctcttacgaccagtgatgatgagcattttttcatgtgtccgttggctacataaatgtcttcttttgagcagtgtctgttcatatcctttgcccactttttgatggggttgcttgtttttttcttgtaaatttgtttaagttctttgtagattctggatattagccctttgtcagatgggtagattgcaaaaattttctcccattctgtaggttgcctgttcactctgatggtagtttcttttgctgtgcagaagctctttcgtttaattagatcccatttgtctattttggcttttgttgccattgcttttggtgttttagtcatgaagtccttgcccacgcctagttcctgaatggtattgcctaggttttcttctagagtttttatggttttaggtctaacatttaagtctttaatccatcttgaattaatttttgtctaaggtataaggaagggatccagtttcagctttctacatatggctagccagttttcccagcaccatttattaaataggaaatcctttccccatttcttgtttttgtcaggtttgtcaaagatcagatggttgtagatgcatggtatttctgaggactctgtgctgttccattggtctgtctctctgttttggtaccagtaccatgctgttttggttagcgttgtagtatagtttgaagtcaggtagtgtgatgcctctagatttgttctttttgcttaggattgtcttggcaatgtgcgctctttttcggttccatatgaactttaaagtagttttttccaattctgtgaagaaagtcattggtagcttgatggggatggcattgaatctataaattaccttgggcagtatggccattttcatgatattgattcttcctatccatgagcatggaatgttcttccatttgtttgtgtcctctgttatttcgttgaacagtggtttatagttctccttgaagaagaggtccttcacatcccttgtaagttggattcctaggtattttattctctttgtagcaattgtgaatgggagttcactcatgatttggctctcagtttgtctcttattggcataaaggaatacttgtgatttttgcacattgattttatattctgagactttgctgaagttgcttatcagcttaaggagattttgggctgagacgatggggttttctaaacatacaatcatgtcatctgcaaacagggacaatttgacttcctcttttcctgattgaatacgctttatttctttctcttgcctgattgccctggccagaactcccaacactgtgttgaatgggagtggtgagagacagcatccctatcttgtgccagttttcaaaggaaatgcttccagtttttgcccattcagtatgataattggctgtgggtttgtcataaatagctcttattattttgagatatgttccgtcagtacctagtttattgagagtttttagcatgaagggctgttgaattttgttgaaggccttttttgcatctattgagataatcatgtggtctttgtcattggttctgtttatgtgatggattacgtttattgatttgtgtatgttgaaccagccttgcttcccagggatgaagctgacttgatcgtggtggataagctttttgatgtgctgctggattcggtttgccagtattttattgaggattttcacattgatgttcatcagggatattcgtctaaaattctctttttttattgtgtctctgccaggctttggtatcaggatgatgctggcctcataaaatgagttagggaggattccctctttttctattgattggaatagtttcagaaggaatggtaccagctcctctttgtacctctgataggattcgactttgaatccatctggtcctggactttttctggttggtaggctattaattattgcctcaatttcagagcctgttattggtctattcagggattcaacttcttcctggtttagtcttgggagggtgtatgtgtcgaggaatttatccattgcttctagattttctagtttatttgcgtagaggtgtttatagtattttctgatggtaatttgtatttctgtgggatcggtggtgatatcccctttatcattttttattgtgtctgtttgattcttctctttattttcttctttattagtcttgctagcagtctatcaattttgttgatcttttttaaaaaaacagctcctggattcgttgatttttttttgaagggttttttatgtctctatctccttcagttctgctctgatcttagttatttcttgccttctgttagcttttgaatttgtttgttcttgcttctctagttcttttaattgtgatgttagtgtgtcaattttagatctttcctgctttctcttgtgggcatttagtgctataaatttccctctacacactgctttaaatgtgtcccagagactctggtacgttgtttctttgttctccttggttccaaataacatctttatttctgccttaatttcgttatgtacccagtagtcattcaggaggaggttgttcagtttccatgtagttgtgtggttttgagtgagtttcttaatcctgagttctaatttgattgcactgtggtctgagagacagtttgttgtgatttctgttcttttgcatttgctgaggagtgctttacttccaactatgtggtcaattttggaataagtgcaatgtggtgctgagaagaatgtatattctgttggtttggggtggagagttctgtagatgtctattaggtccacttggtgcagagctgagttcaagttgtggatatccttgttaaccttctgtcttgttgatctgtctaatattgacagtggggtgttaaagtctcccagtatttttgtttgggagtctaagtctctttgtaggtctctaaggacttgctttatgaatctaggtgctcccgtattgggtgcatatatatttaggatagttagctcttcttgttgaattgatccctttaccattatgtaatggccttctttgtctctttcgatctttgttggtttaaagtctgttttatcagagactaggattgcaacccatgcttttttttgctttccatttgcttggtagatcttcctccatccctatattttgagcctgtgtgtgtctctgcacgtgagatgggtctcctgaatatagcacactgaggtcttgactctttatccagtttgccagtctgtgtcttttaattggggcatttatccccattacatttcaagttaatattgttatgtgtgaatttgatcctgtcattataatgttagctggttattttgcccgttagttgatgcagtttcttcctagcatcgatggtctttacaatttggcatggttttgcagtggcttgtaccagttgttcctttctatgtttagtgcttccttcaggagctcttgtaaggcaggcctggtggtgacaaaatctctcagcatttgcttgtctgtaaaagattttatttctccttcacttatgaagtttagtttggctggatatgaaattctgggttgaaagttcttttctttaagaatgttgaatattggccctcactctcttctggcttgtagagtttctgctgagagatccgctattagtctgatgggcttcccatagtgggtaacccgacctttctctctggctgcccttaacattttttccttcatttcaaccttggtgaatctgacaattatatgtcttggggttgctcttctctaggagtatctttgtggtgttctctgtatttcctgaatttgaaagttggcctgccttgctaggttggggaagttctcctggataatatcctgcagagtgttttccaacttggttccattctccctgtcactttcaggcataccaatcaaacgtagatttggtcttttcacatagtcccatatttcttggaggctttgttcgtttctttttattcttttttctgtaaacttctcttctcactttatttcattaatttgatcttcagtcactgataccctttcttccacttgatcaaatctgctattgaagcttgtgcatgcgtcatgtagttctcatgccatggttttcagctccaccaggtcatttaaggtcttctctacactgtttattctagttagccattcgtctaatcttttttcaaggttcttagcttccttgcgatgggttcgaacatcctcctttagcttggagaagtttgttattagtgactttctgaagcctacttctgtcagcttgtcaaagtcatttccatccatctttgttctgttgctggggaggagctgcaatcctttggaggaaaagaggtgctctggtttttagaattttcagcttttctgctctggtgtctccccatctttgtggttttatctatctttggtctttgatgctggtgacctacagatggggttttggtgtggatgtcattttatttgttgatgttgctattcctttctgtttgtagctttccttctaacagtcaggtccctcagctgcaggtctgtgggagtttgctggaggtccactccagaccctgtttgcctgggtatcaccagcagaggctgcagaacagcaaatattgcagaacagcaaatattgctgcctgatccttcctctggaagcatcgtcccagaggggcacccgcctgtatgaggtgtcagtcggccctttctgggaggtgtctcccagttaggctacatgggggtcagggtcccacttgaggaggcaggctgttctcagagctcaaacaccatgctgggagaaccactgctgagagctgtcagacagggatgtttaagtctgcagaagtttctgctgccttttgttcagctatgccctgcccccagaggtagggtctatagaggcagcagcccttgcagagctgtggtgggctctgcccagttcgagcttcaccagcactttgtttacctactcaagcctcagcaatggcagacacccctccccctgccaggctgctgcctcacaggtcaatctcagactgctgagccagcagtgagcaaggctccgtgggcgtgggacctgctgagccaggcacaggatataatctcctggtgtgccatttgctaagaccattggagaagtgcagtatttgggcaggagtgtcccgattttccaggtacagtctgtcatggcttcccttggctaggaatggaaaatcctccgaccccttacgcttcccgggtaaagcgatgccccgccctgcttcagctcaccctacgtgggctgcacccactgtccaaccagtcccagtgagatgaaccaggtacctcagttggaaatgcagaaatcaccgtcttctgcgtcgatcacactgggagctgcagaccggagctgttcctatttggccatcttgggacggaatcttacttgttttatttacgtatatatttttctgaaccattttgaaagtaattggtagccatcatgagaccttaactgaatctctttgaaaaataaaggacattctcccatataaccacagcaccatcatcacaatcattggcaaatctttatgtttctttccagtcttttacacacatcaacacatacacaatcatatattccaacttgtaaatgattagttaacttagtaagttcaacttaagagttgaaattacagtactcacttattaactgacatgtttgatcttctcatttctactgccgccactccacctccctctagtgtattctgcccacagcagctaaagtaatctttttaaaacataaatcaagtcttatcactctcctgcctaaatcattccaggtttcctgttctgcaccatggcctgacccagcccctggcctcccttgctgatctcatctcctgccaattcccctgagtcacacaatgtattttcagtcccttgaacaccttcagctctttttaccatggtgccttgtgcttgaaattctcttggcttttttccatccctcagacttggtaaaacatctcttactcaaagaggccttcagcaactgcactatctaaacaggtcccaagttaagttctgcccttgcccctatttgtatctttcatgacgcttgccagtttgtgcttactcatgaatatcaccctccagctcaggcctggtaaataataagttgagtctatacattggttagctttgccttcctttagcaggaaataaaaaatgggctgggcatggtggctcatgcccgttatcccagcacgttgggaggctaaggtgggaggatcacttggagttccagaccagcctggtcaacacagtgagaccctgtctcttaaaaaaaaaaaaaagtagagaaagaaaaaaataaatacaaaataacatgcttaactatgtatttctctctcaaggaaatccaaaagtggacagtctaaggctgctacggtggcccttaaggacatcagagatccaggctccttttatctgtctgcttcaccatacttagccagagagggtggcctcatggtataagatgactgctggagtaccagccatcccacaaacattctggagaggaggagggaaagaacaaaaagagaaaaaagcagacttcccacctgagtcagctttgtttaagggtccttcctagaagtacccacaccacttctgctcatatctcactggctagaagtttatcacatggccatcctttatttaagggaggcagggaaatgttctttttattccacatggcagtgtgtccagctaacacgtagggttctattagtgttggagaaggggagagtggatatgaggtgacaatcagcagactctgaccaggtatagctgggtcagaaattgaaggtggaatttagaaaagctgccaggacagacatgaccttgctagcttatacgtgatggcatgttcatagtattctattattatttatctcaaataccagcttttgctatcctccagattttgaaataagcaacttgtgtcccatctctgcttgaaacaggttcaacaagaaacccaagagggggatccagtttctccaggagcagggcatgctgggaacgtcagttgaagacatagcccaattcctgcaccaggaggagcgcctggattccgtaaggcttgggggtgtagcacttgcatgtgagttctgtcaggtgattgtgagcccttaccagttttaacctcgagattgtctggccctaagtacattgtctgttgtccacccccgggttatacattgtctattgtccacccccgggttacagcagtcctgtgtatcccgttggctagtgttgcagaaagctctttgatgggaataaactagcctcccagcaggtggctgcatatttgctggaagagagtcagagctggaagtgttccttgactgctagaaagttcttacggctgcctgtctgcaactaacctccttagtgtgccccgtcattctctccattttaagtctcttgtgccccctcctcttccttcatccatgcaggacaggctgcttctggaatgggtgggtgggtgggcaggtcagggagttccctagcttttttaccagtccagcctattctgggcagttagggccaggctattctgactccaccctttggctgctggcttttgctgagggttcgtatttgacaatttctggatataagtgagtgtgtatgtttcagacccaagtaggcgattttctgggagatagcgcaaggttcaacaaggaggtgatgtatgcctacgtggaccaacttgacttctgtgaaaaagaatttgtctcagccctgcggacattcctagaaggtttccgcctacctggagaagcccaaaagattgaccgattaatggagaagtttgccgcaagatacatagaatgcaaccaagggtgagcgccgattttgagtcccttccagatcatctgtttgcctgcctcagaacgctaattctaatttggttggggtttaatctttgtatatctgtgccaagcaactgaagcttttgtttaccgtgtgccaggcactgtgctaagggattatttcacataagacctcacagcaacctgtttatgtccctattctacagacaaaaagattgaggaccagagaggttaacttgcccaagatcacacagctaaagcccatgctgttagcaactataaaagagtagtttcataagttgagaggagacaattgggcacctcttccctaatcaaaaacagttcccctgatttaatatatggggtagatctcaaggattttggtttttctttaattgcatactgatgagcaggttacagaaatagctacataactaataaaaaccaccaaagtacatgattttatctggggaccttttttgatgggcggttcgtgattttgtaagaagtggaaataggaaggggaacaaaccattattaaatacctcctgtgtgtgggccatgccatgggttttacatgcatttaatttaattaatggcaagcccaggaatagtatccctgttttacagatgaggaaattgagaatctgagagattgagcaacctgtccaaaattaatcagctagtaaggagcagagccagggttgaatatggatttctctaactcagaagctcatgttcgggctggatgcagtagctcttgcctgtaatcccagcactttgggaggccgggacgggcagatcacttggggtcaggagttcgagaccagcctggccaatatggtgaaatcccgtctcttccaaaaatacaaaaaaaaattagctgggtaatcccagctgctcagaggctgaggcaggagaattgcttcaacctgggaggcagaggctacagtgagccgagaccacaccactgcacaccagcctggatgacagaggcagactctgtctcaaaaaaaaaaactcatgttctctccactgaacattaaattagaaatatgtctgaatatgctgtgaccatgatgtggaaattgttcagtggaaactattttttttgagacagggtcttgctctcttgcccaggttgaagtacagtggggtgatcacagatcactgcagcctggatctcctgggctcaatcagtcctcccacctcagcctcctgaactgctgggactacaggtgcatgccactgtgcctggctaattttttgtataatatttctgcagagatagagtttcaccgtgttgcccagtctggtcttgaactcctagcctcaagggatcctcctgcctcagcctcccaaagtgggggatttacaaatgtgagctaccacacctgattgaaacattttaataactgttttgcctctcaggtcaactttgttttcatattaattgctcccagtcttccaagtgtatggcaggctgtccccaggaggtggcaggattggcaaaggcagcatatcatcattttaaccaaatggacattagaactctctatgaaggcataattagatgctgtttactttaaacgtatctcctatgtggacctgggagccttggtctgttttgctcagtcagtaaatatgtgacccagtttcatctcatattaaaagacctttgttgtgttcttcaaaatttctactgttcctgttatggacagtttggacagaacagtttctagcttcagcctcatatcgtatgaagctgtacatccacatgttgtccttctcttcttgcctaaggcaaaaaagtcagacttcaccaacatattgtttagaacaacataaatattttccatggtatttctactattaaatgttataatgggtaatatagactataaataacagctaaacagcagttttagtcatctttatatctcatgtctagcacagtacatggcacaaaatagatgttctcaggaacaggacaaggtgggggaggcactcaagcgcttagtgtgtgaaatatagtgagatgccctctctcagggtcagcaccaagtgtaaggtctcctgatgtgctcacttgcttcaccctagtcttggccccagatgcttcttagagtctttttaaaaaaaattatttgaaattgctttattcaaagaagcctcaatttttattatttatttatttatttttgagacagtctcgctctgtcacccaggctggagtgcagtgtcacaatctcagctcactgcaacctccacctcccgggttcaggcaattctcctgcctcagtctcccgaatagctgggattatgggcacccgctgccacgcccagctaatttttgtatttttagtagagattgggtttcaccatgttggccaggctggtctcgaactcctgacctcaggtgatccacccatctcggcctcccaaagtgctgggattacaggcctgagccaccacgccctgccaaagaagctaaaatttgatacagattgttaatgagctttttctacactctgggttgctaagtcttgttcagtgatgatgaaagcgtaaaaactcttgcctcatttggaatcaaggggagtagtcggctgcttttctcgtgaagtgtgtctctgttagcattgtaccttccaaaccgcatcaccatgaatattgatgtctcgaatttttttctccaggcaaactctgtttgctagtgctgacactgcttatgtcctagcgtattcaattattatgctgactacagacttgcacagtcctcaggtaaagcactttaatgatttacatgttgtattagctaaataagtggctttacttgggcaattggatgttttttaaatggtttttaattttttttaattacaggtaaaaaataaaatgacgaaagagcagtatattaaaatgaatcggggtatcaatgatagtaaagatctgccagaagagtatctctcaagcatctatgaagagatagaaggcaagaaaattgcaatgaaagaaacaaaagagctaacgattgcaaccaaatctactaagcagagtaaggtctaatggcaaattatttcttttagttctaattttttagtgtatcagaatgcatgattaaatactctggtgataaatttaatgtgcatagctggatatctgaataggaaatgtgattgaattaattattgtgattatgttgggacttttataatgtcactgtcttgctagatttctgatgaggagcaagaaggaatttaaaattagtaatctgagaactaaattactcccaaaaagtgttctttaaaacttttctttaattcagattgtgtccgccttgattagaattctattagttatggcccctggggagctgtcagtttcactgtttgagaagcagcaaagggtagtggtttagagtgtggctctagagccacactgccttagatcaagtcccagctcctctacttagtaattgtatgaccctgggcaagtgacttaccccctctgcctcatttttcccatctgtaaaatggtaataataatatttgtaatggactcacgagatggttgggaggatttaggagttaatcattgtgcatcttttgaaacagtgtatggcatgtagccagccctcagtgactgctagccacacctatcatgctcttactttacagatgtagctagtgaaaagcagcggcggctgctgtacaacttagagatggagcaaatggctaaaacagccaaagctctgatggaggctgtgagccatgccaaagccccgtttaccagtgccactcacctggaccatgtccggccaatgttcaaagtgagtatcctgagaacttagcaagcatgtggctaagcctgattctgaagctggccagcgagaagtactctttccacgctaaaactctggatgttattgaaatcttccttccatgatagctggtgtggacgccactattggcagcctacagcatcggactccagaactgtgatgacactgaagtggcctccttgtgtttggaaggcatccgatgtgcaatccgaatcgcctgcatctttggaatgcaggtaggtgtaagtcagcaacactccagagatactggtgggttgtgctcttttagatttggcaaaacttagaaattatcagaaattttcagttaatcaagactcttagcaagctacttacttatgcctactgacaagaaatccgtagctttgtgatgacagctcgttaggggcaaaaatggagatacggattaaaactgtctttaagaatgggtaggctgggcacagtggctcacgcctgtaatcccagcactttgggaggccaaggcaggcagatcacctgaagttgggagttcgagaccagcctaaccaacatggagaaaccccatctctactaaaaatataaaattagccgggtgtggtggtacatgcctataatcccagctactcgggaggctgaggcaggagaccggcttgaacccaggaggtggaggttgcggtgagccgagatcgcgccattttactccagcctgggtgacaagaacgaaactccatctcaaagaaaataataataataataataggtagggtccaagcttcttgactggatttgacaaagcagacttcgtgttcatctgcctaacttgcctgctttggtgcttaaaaatactatttcctttttaacatcagtttttattataatttcgcatatttccaactcttccctggagaaacaagtagttcaatgcaatatgaatatgtctgtaaacctttgaaacttgaaaagttcaagcaaataaatgaaatgtaattctgaaactgttacgaaattaggaggttgacaatcccatgcatcactttgtaagtcagaagttgcaccccatttatttttaaaaactcaatcttctgttcctattcattttacagttagacattttcttttataccaagaccacaagctttgacgttagaccatctaggtttcaagaccccactctgccacctctccaaccatgtgacattggctcagctaaagtctctctgagacaccaattcatttcctcatttgtaaacttgagaaaacagacctgcctggcagaattgttgcagatgtcaatttgtgtgacagtcttagtattcaacagacatagtggaacatgggacaggtgagtttgactgaagtcaattagaaaggagagagctgcttctcaaacatgtggcagtgcatagatacctctgcaagatgttccaaaagcaagagggcattagcatggaataactgttgtgctaatgtgcagaaagccagtcaatgtgcatacaaaaagtatcagagaagcccagtgtgccagccctgcagatgtgagaatggccacactaaggttggagtcacagtgttctctcttgggtttctgttacagctggaacgagatgcctatgttcaggctcttgctcgcttctccctactcacagccagctccagcatcacagaaatgaagcagaaaaacatcgacaccattaagacgcttatcacagtggctcacaccgatggcaactaccttgggaattcctggcatgaggtacgtgtctctttgaattgccttttctcagttaggatgactcctggcttccttttattcattgttgatctcatttggtcagttctgtttttcttgaagtcaaatcactgtacctcatgtatctggaagtcaccctctctggggctgtgaaaggcgggggcgagttcaggcgcaccagctcacagtgagcacccttgcacccagcagccagtgtcccccatgaagtgtacttctgttgttgcaactttctttccatattagtgccatttttttttttttttttagtccttatgtacctcttgggagcttgggagctcctgtgatcaatgtgtaattttaagacaaagccaggagcctgattagaaatggttgatagtcacaatgagctgttagggagagtgccagtgaattcacatgtttttaaaacagtattctaagattctcacccaaggatatagttacttatgtgtacaacaatgtatttaaaaggatatttgttgcagttttagttgttctagggaaaagtttgggttaaaaagagctagatgtcccaacaatataagagattgctactttttttaaaaagtatggtacagcattttttagaatgttatgtggccatttaaaataatgttgtggaaaaaaaagacaggcagatagtatgtgctctctgatggaagtacacaatactacctaagaaatgttctagccccaactcaaatctgaattgattcaagcctatattgccagtttacaggaaatacagtggacagagaagcatgttagatatgagggtgcagcttggaaattctaggtgtgacagacctgcagagcagatgaccaggtttttcagcaaaaaaattgcaagaaaaataagggaggagggttacctatgaattaaaagagatttcagaaaagaagataaaagatgattttaaagactattgtgggaaaatggtcacagtaaaattacaagttgttataagagattgtgaggcattgtctctcgtggcaaaatacacagagaatgcagtttgaaaggatagaccaaagcattaacattctgtctgagaaatagaattatggaaactgttttattcttttttttcttaatttctaattttttctgccatctacatgtattacttttttgtttagagagaaaactgtgaaagaatagagatgaggctgtggagaatgtaaaggacagtttgacatagaaaattgctgtcatccttcttccccatgtggaccacatggctcagattcagagtaaaggctctagagcctggcaactggggtctgatttggggctccacctcttcctgcctggatggcacaggcaggttacttagtcaccgagtcccaccttcttcatctctacaatcttcacagggtggttatgaaaatgaagagggcttgggactgtatttggcaagtaataagaactcaatagtgttacctgctgtcatctccgtggcgtatggctttgctcctcttcaccagcctttcctctctctgtcacaactctgagtagtccatgttagaaataactgagttatggctgggcacagtggctcacacctgtaatcccagaacttttggaggttgaggcagaaggatggcttgaggccaggagttccagaccagcctgggcaacatagcaagaccccatatctttaaaaaaaaattatttttttaattagctaggcatggtggttcatgcctgtagtcccagctactcaggaggctgaggcagcaggattgcttgagcccaggagttcaaggctgtagtgagccttgattgcaccactgtgctgcagcctgggcaacagagcaagacctcatctctaaaataaaaaaatatatattttgaattgtgtgctttttaaaatcatttcctgccttctaaggagccataatacgtagagaatcaatgaatagttgctttttcttctaaaacatttttttagcctgggaggtattatcaatatgaggttcctgctgccagccaagtatatggcagaatctagaaatgttaaaaattaattagctacctctgcggttgtcagaagccctgagaaatcagcttggaactaataagcccttgacctttcagtattggtgacgtacttgagattccagctgtccccagcttctgcaaaagggaggacattactagcttactaataataatttaatagtgtgtgaagaaatcaggggatgattctctttggtggaattaagtctatttctcagtcaagaagaaagcaatttataagtaaagatactcggcagtgctcagtggtatagtggagtcctggactctgggactgagttgtaaggtcagcgtaaaaagcaacactgaagttcagtcagaagttcccatgaaaattccttagggtttccctggaggtctgtgtgccattccttggtaagtttcatgtagccagtgtttcctctgacagaagttgggaccagtttctgtttctacagctgagcttcaggtaggagggcccgtgtgcagatctgcattctcaagcaccagaggcacccctcaggaccaggagatccagcctcatctcccactgcatgcctgatgtagagcatattctcattccttcagttaaaccaattaacgattgccaacaactttaagtgccagggacttaagtgttcagcagtgaacaagacagagttaatgccctcttggcacctaaggcaggaaacaaacaaatagatatatggtataatgccaaaaagtggtaagcactaagaaaaaaaaagtatgagcaggacatggtaatgggaaggtacgatctcacaagaaagatctctttgagagggacacacatgtctgagctgggaattgaaggagtgagccatggggagacaacattccaggcataaggaacagtgagtgccaaggccctgaggtgggacaagagatgacaagttaaaggagcaacagtgaggccaatgaggctggtgtcttgtcgtctcacgaggagggtggaaaaaggaggtgggggtgactaaatgatgtgcctattaagtgacatggtgggaggaatccgccgccccagtcaaatgctttttctctctttattgagagcttactaaatttgcataaacatctatatggcataactccattgaaccaacttttttttaatgactaacttaagattacagtgccctttttctagctgtaaggtaggaactcatttcttcatgccttctttctcttagatcttgaaatgcatcagccagctggagctcgctcagctgataggaaccggtgtgaagacgcgctacctgtctggatctgggcgtgaaagagaagggagcctgaagggccacacattggcaggagaagagttcatgggccttggcctcggtaagacaccaggccccacagctaacagtcacggatttgcaagctaacggggatgaaacccttcttgtctcatcaggactgtcctgtaaaccgtctcttccttttgtgccatctgacagtgttcatgaatgcaagtggacgtgctgctttggcctcttaattgtgattaaactgttgagtaaaatgtctattttaccaaagtcagtagggtgcattacttttctttctatacctatcactatattggggagaaaaaccatttgctttaaaatgttcagatctctagtgcctgacattagaggggtgtgtatttgtgtctctaggttttaaagggtaggttcaacatttcttccatctttattggggggcttttattaaacagtattcttatgcaagtagaattatttctctggctatacattggattgagaaactcttctgattgatgtaacatggtaataatagtaaatagggcaaacagatgtgccaagtcatattctgagcactcagtttatatattttaactcatttaatgctcaaaacaatccaatgagaacagggactgttatattccccattttgcaattgagaaaactgaggcacggagtgaaaagatatgagcagcatcatactgcaaaggagtggcagaggtaggattcaagccctaagccatccaactacggagtgtaggcttctaggtcccatttagtgagtggaatagtacagtgtcatggttaaaagtatggactctggaaaaatggggaattgtaatagcacccacttcttagggttctcgtgaggatgagtgtaatgaaagtctgtgaagcacaccaagcattcagcaggtgtgagccattaatgttctaggagctctggattaatatcaattgattcaaatttgttttcctaaatataggcctttaatactataaaaatgtaaaagattatagagaaaggtagatggttggtagaaacaagaaagcttatactaaggatatattttaaatgcccaatgccaaaacaaaactttaattttatcatcagtgggtttttgtttcttttttgaacttgcagagtcattcccatttatgtcccctgtccctgcgtgttgacataacaggatgctttgttctaaatacttgactgtttttgaagtactgctgattttgtgcattgtgtttcaggtaatttggtgagtggcggagtggataaaagacagatggccagcttccaagaatcggttggtgagaccagctcgcagagtgtggttgtagctgtggacaggtaatgattttattcttcagtgaccctgaactacacagtggtttggtggcctctctgtagttactggacatgaatgattcctaatttctttaactgatacaagtgttgttagctacaaattgcttaagtgtcacatttatttgcattttgaccttttagaaaaggtataactttaacattgtgacaaattatgtcaaaaataagagtttttcgcttatgttgatgttttaaattaccttgtttccttagtagaaattatttttttaaaaatcacaagaagagtttaggattaaaagcctacccatgctcacgcctgtaatcccagcactttgggaggtcaaggcaggcagatcactagatcaggaaatcgagaccattttggctaacacagtgaaaccccgttctactaaaaaatacaaaaaattagtcaggcgtggtggtgggcacctgtagtcccagctactctggaggctgaggcaggagaatggcgtgaacccaggaggcagagcttgcagtgagcggagatggtgccactgcactctagcctaggcgacagagtgagactccatctgcaaaaaaaaaacgcctacccatgctcatgcctgtaatcccagcactttgggaggcaggtggatcacaaggtcaggaaatcgagaccatcctggccaacatggtgaaaccatgtctctactaaaatacaaaaaaaaagaaattaactgggcatggtgacgcatgccagtaatcccagctactcgggaggctgaggcaggggaatatcttgaacccaggaggcagaggttgtagtgggccgagatcgcgccattgcactccagcctagcaacagaacgagactccgtctaaaaaaaaaaaaaaaaaagcctacccatgaatgagagttggctgagttgacagtttccttttttttttttctcccctcaaaacttttccattatttctctttactcaaaacttgacctaaaaatccaggagagatatttcccataaagaagcttcgtacttattagcaatcactctccgttttcttttctttccttcccccattccttagtcactgtaaccactgatctacagatttgcctgttctggacattgttccattgtccatctttccctttttattattttaatattcattatattctatttattaaccacgtagtttccttatactaacatctttccctttaattctatcctttttcaactcatgtatgttgcctctattgttaagtgcatataatgtcgtgtcttttgtgttcccatcttcttccactgttactgccttctgccttctttgtgttaaatagatattttctagtatatcattttacttctggtcatttcttgtactatatcttatgtattgattgattgattgattgattgattgagacagtctcgctctatcacccagtctggagtgcagtgatgtgatcttggctcactgcaacctctgcctcccaggttcaagtgattctgctgcctcagccgcccaagtagctgggactacaggcatgcaccaccatgcctggctaatttttgtatttttagtagagacagggtttcaccgtattggacaggctggtctcgaactcttgacctcaagtgatccacctgccttggcctctcaaagtgctgggattgcaggcatgagccactgcgcctgggctcccccgtcttttgatgtgtcactttctcttctgctcactataggtttttctgctttcaactcagttcactttccttgaaccgttctatacttgtaataccacatcatttatttcggtggaggtgtcagacctgatgtttcctctctaccttgtctgagagtttgagaaacttcagcttccaaatctaattaaaaagaaaaaacctgtgtgaccagagatcatctggcttttatgcccagtactaagacagaagcagaattgccctcagtctaccaaatctaatgtttattttttgtttttttgagacagagtctgtctgtgttgcccaggctggagtgcagtggcgcaatctcggcttactgcaacttctgcctcccgagttcaagcgaatcttctgcttcagcctcccaagtagctgggattacaggtgcccgccaccacgcccagctaattttttgtattttttattagagacaaggtttcaccatgttggccaggctggttttgaactcctgacctcaagtgatacaccctcctcggcctcccaaagtgctgagattacaggtgtgagccaccacacccggtctaatgtttattttgtctggaattatcttcctaggatttttactgggtctaccagactggatggaaatgcaataggtatgtatttgacttacctgtgaaaactgcagaagcctcacgctgtgaccgtctgactgttcctaacgaggctttgcttgtgttgttgggtctggcctgtagttgactttgtccgctggctgtgtgctgtgtccatggatgaactggcttccccccaccatcctcgcatgttcagcttgcagaagattgtggagatatcatactacaacatgaatcggatccgactacagtggtctcgaatatggcatgtgattggagatcacttcaataaggtaactcttcaaatttaaaaaccattcctgttaaaaaaaaaaaaaagtagacaactgaattcaaaaaaagaagtgataaataatttgccctgttttttagatgcctctaattcattttccctgtgcagtcaaggacagcttgataggagtaatatcatacttatatattggtagcattcatgtagaatgaattaaaaatccagtggtattgaaaatactttaatatcccacatgcaggatgtaggctaagaccacaaagattattacagccactagacaaatacactgatgcttggaagcattgtgaaatgaaatccagaaaggccttttaaatgacctaatgttaagttacgttccaggtagttttactcttcaatgtcactgcttcttgtattccggcacctattgccaccattcttctgaaacttttattgaaaaaattaatatttgggccgggcgtagtggctcacgcctgtaatcccagcacttcgagaggccaagatgggcagatcacaaggtcaggagtttgagaccagcctggccaacatagtgaaaccccgtcaccattaaaaatgcaaaaaaattagctgggcgtggtggtgtgcacctgtaatcccagctactagggagattgaggcaggagaattgcttgaacctgggaggtggaggttgcagtgagtcgagatcgcaccactgcaccccagcctgggtaacggagcaagacttcgtctcagaaaaaaaaattaataattgtttttaaatcagtaacaagccaaagacccatctgggttctaaaactgacaactgttgggaataaaccagactgaacttcttcctcgttaccagaagttttattatatacatacagacatatgcacacatgttgaataaataaaatgtcagatatgtgttttatcacggccaaaaaactgggaacaaagcaatcaaaagaaatgtatgtggccgggcgtcatggctcacgcctgtaatcccagcactttgggaggctgaggcaggtggatcacaggtcaggagatcgagaccgtcctggctaacatggtgaaaccccatctctactaaaaatacaaaagtttagcccggcgtggtggcgagcgcctgtagtcccagctactcaggaggctgaggcagaagaatggcgtgaacccgggaggcagagcttgcagtgagctgagatcgtgccactgccctccagcctgggcgacagagcgagactccgtcttaaaaaaaaaaaaaaaaaaaaaagaaatgtatgtatgtatgtatctgtgatgtcatttgcctcttaagggaaaggtaataataacagcttcctaccaaaacacatttcatgatctcaagaaaattttctcaaacctggtggtgaagagttataataccaatgcttaaaaatagtgttagtaaaaaaacaatccagaaattctgtacattgaatagaggaaaatcttaaaaagtagtctaccattggggtatagaataatcaatggggtgctggtaaatgatttgtagcatctgccagtttctgtgtgtaaacaccctgccacagccaatttaaagttagcaatatgatgtaactagggaagagatgggcacctcattacctcttgtggacaggtgctagtctactccaccactcccctgaaatgaagcattgtcatatgtaggcttgcttctaacttggtgcatcagctaatgaaagttccttgtttttccatcagctcaaattaaggcacctcacagcacactgtctgttttacaaaataatctgagtgcttcatgctgggcagtggacagatgagacccctgcctgcatggagctccctgtcattttatgataagataactgatgggaaaggatcaagcatgtcatatatcagggttattgagaaaacatggtcagggaaggtccctctttggaggtggccttgagaggcacaggagcctgtggatgatccaggggaactatttgttgagtggatggtatcactttaaataatcaactaactcagcaccatcttacccactattctgagtaaacaaattcctaattggaccaattgaaataattgatgtgaatttgcttgagaaagaaaatgtgaatcattgcgactactgtaccttgtattcttgtccaaacatgtgacagctaagccagaacaaacgctgctcatttattccacaagatcatttggctagcaactgtggaatcctttgttctctcagaaatgactagctaaaagtgttttggtaaacgttttcccaactctttaaagtctgcattttgtgttcattgggacttctgttttgggaggggaacatcagtttgctcaagttactcttcccacctgtgattctgttgtgaagaatctgtgtgtgccaattctcagtatgtatggaccacttacaggcaaggttgggacatagggtggcaggtgggaaccagacatttaattgtcatcaacttcattacaaatgtctgtttatttaatcagtgctgtttaagcaccaggtcatggaaaactcaggaactctttttttttttttttttttttttttgagacagagtttcgcactgttgccaggctggacggcagtagcttgatctcctctcattgcaacctctgccttccaggttcaagctattctcctgggactacacacatgcatcaccacacctagctaatttttgtattttcagtaaagacagggtttcaccatgttggccaggctggtctggaactcctgacctcgggtgatctgctcgcctcagcctccgaaagtgttgcgattacaggcatgaaccaccgtgcccggccctcactctgggactcttaactttttccaccaccttggaaagatgttcttcccattgtgaactggggcacttaagaatcttgcagatttgaagaaatagatatggctcaatccagctgtaacttagccctcaggttgctggcagagttgttcgcacagtcacatgattctcttgaactaggggcaccagccctgtgtcctggatgagcaaagcttcacactaagcatggtgtgtatgcctggagcatctgttttacctggatatttaagaaaggaatattctttttgttagtctctaattacattaacatactcccctttacacaaaaattacagctaaaacatctttggccaccctcccccacacatctggccctccccaaagctaattattcttactagtttgttgtatatctttccagacatttttgtattcatgtgcatatgtatgtactcatagaaatattacagataatattgtcttggtttgtttcgctttttaaaaaaattatacatagcattttgtaacttgtttcttccacttagcaaggaatcataaagatttaaccatgttagcatatgtagatttgttctcttttaagaaattgtaataaaatacacataacaggccgggcacagtagctcactcctgaatcccagcagtttgggaagctgaggcaggcagatcatctgaggtcaggagttcgagactaacctggccaacaaatacaaaattagccaaatacaaaaattagcagggcgcggtagtggacgcctgtaatcccagctacacgggaggctgaggcaggagactatctcgaacccggggggtggaggttgcagtgagcagagatcgtgccattgcacaccagtctgggtgacgagcaaagctctgtctcaaaaataaaataaataaaataagattaaaaaaatagaataaccatcttaacaattttaagtgtgcggttcagtagtgttaggtacactcacattgttgggcaacagatctcaaggacccttttcatcttgcaaaactaaaactgcatacccattaaacagtaactcccactttcaccctcctgaccacaggcaaccaccattctactctgtgcccctaggaacttgactactatgggtacctcatataagtagaatcatgctgtgtttgtccttttgtgactgccttatttcattcagcatagtaatgtcttcaaggttcatctgtgttgtagcgtgtatcagaatttccatccttttcaaggctgactttattatttatttatttatttttgagatagcattttgctcttattgcccaggctggagtgaagtggcaaaatgtcggctcactgcaacctctgcctgccaggttcaagcaattctcttgcctcagcctcccaagtacaagcaattctcctgcctcagccctcccaagtagctgggattataggcacccaccaccatgcctggctaattttttgtatttttagtagagacacagtttcaccacattggccaggctggtcttgaataccagacctcagatgatccacccgcctcagcctcccaaagtgctgggattacaggcgtgagccaccacgcttggcccaatttttatttttttaactttttttttttttttttttttagagacggatcttgctctgtcacccaggctggagtgcagtggcaccattttggctcactacaacctctacctcccaggttcaggcaattctcctgcctcagcctccccagtagctgggactacaggcatatgcaaccacgcacagctaatttttgtatttttagtagagacagggtttcaccatgttggccaggttggtcttgaactcctggcctcaggtgatcctcccgcctgagcctcccaaagtgctgggattacaagtgtgagccaccacacccagccccaatttttcattattacaaatgatattgctgcattctattaaaaataaaacattggccgggcacggtggctcatgcctgtaatcccagcactttgggaggctgaggcggttggatcacctgaagtcaggagtttgagaccagcctggccaacgtggtgaaaccccgtctctactaaaaatacaaaaattagccgatcttggtggcgggcacctgtaatcctagctactcaggaggttgaggcaggagaattgcttgaactggggaggtggagattgcagtgagctgagaccacaccattgcactccagcctgagcaacagagcaagactccgtctcaaaaaataaaataaaataaaataaaataaaacatcaggtcagaccacatatcaatgaaatggctcacttggagcaggcctctgcaagatatccccagatctcctggcagggggtgtgggtgggaaacattctcttgctgtttttagagattctccttgagagaaaagtctgaaaagcaccagccaaatatttacccataactccagttcctaaaagtaggcaaaccatagacaagtacaatttttaaggaaattgaaaagcctcaataattttgcagaagttttggagattgatgatatttattttatagtcatttgctttagatgacagacattgggaaagtgtgaaaaggctttccatagactgtaaaggcttttgacccttcatatatatatatttggagaaaattaaatagcaccttgggagatgttgtttaatggatatagagtttcattttttcaagatgaaaagagttctctgccgggcgtggtggcttactcctgtaatcgcagcattttgattgaggcggcctgatcacttgagttcaggagttcgagaccagcctggccaacatggtgaaaccctgtctcttctaaaaatacaaaaaaaagtagctggacggggtggcaggcgcctgtaatcccagctactcgggaggctgaggcaggagaatcgcttaaacccaggaggtggaggttgccagcctgggcaacagagttagactttatcttaaaagaaacaagaaaagaaaagagttctgattggcttcacaatagtatgaatgtatactactgaactgttcacttaaaatggttaagatggtagattttatgttatgtatattttacaattagaaaaattgggtatagttgcaagtttaatagcaaaagaaaaaaaaaagaaaagaaaaaaataggttgggcgcggtggctcaccctgtaattccagcactttgggaggccaaggcaggtggatcacctgaggtcaggagttcgagaccagcttggccaacatggtgaaaccccatctctactaaaaatacaaaaatcagccggcaggcacctgtaatcccagctacttgggaggttgaggcaggagaattgcttgaaccggggagatggaggttgcagtgagccgagatcacaccactgcactccagtctgggcgacagagccagactccatcttagaaaataataataataataataaaatgaaatttaaaaaagcagaaagtagcacattttaaatgcatatttaattaactatgcaatactgatttcgtcattacacttaaaataaaactggacagatcatagccaagaaatagcattttcttttctccttaggtgtgttttccctgaatgtttgttttgaaggtaggctgtccatctttgctgttgagagacccacgtcggtcattattacactatacctgtttcacatcagttcctgttcttgttcaggttggctgcaaccctaatgaagatgtggctatctttgctgttgactcattaaggcaactctccatgaagtttcttgagaagggtgaattagccaacttccgtttccagaaagattttctgaggccctttgagcatattatgaagaaaaacaggtatgtgttttgctctggaagacgcttggtcaaattccccgttggggctcccagaagccctcctaacactaaccacatgattaatttttttcctcccttgtcagtggaaacaaatagaatgaatagactgtgattcacatcgattttccttaaacaaatctcactaaaatctatgtgtagcctttcctaggaggacagatgtcaccctgcaacttgtagaaatatgtcgtgaaccggctgggcacagtggctcacacctgtaatcccaacactttaggaggccgaggcgggtggatcacgaggtcaggagatcgagaccatcctggctaacacggtgaaaccccgtctttactaaaaatacaaaaaattagccgggcatggtggcgggcgcctataggtccagctacttgggaggctgaggcaggagaatggcgtgaactcaggaggcagagcttgcagtgagccaagattgcgccactgcactccagcctgggtgaaagagcaagactccgtctcaaaaaaaaaaaaaaaaaaaaagaaaagaaatatgtcatgaaccccttttggggctggttctcagggagattaaaggaagagccactgcagaagcatcctcaaaccaggataagaattatgtgacccatcacttctcccccagggaggtcataaaagaggtcaggataccgggccctgtgaagcagccgtactgttcatttattcactcggcctggacttattgagacttgccatctgctaggtactataaagaagacattttaaaatcctgtgtttggccgggcgcggtggctcatgcctgtaatcccaacactttgggaggccgagtcaggtggatcacctgagcaggagttcaagaccagcctggccaacatggtgaaaccccgtctctactaaaactacaaaagttagccgggcgtggtggtgggcgcctgtaatcccagctactcaggagactgaggcaggagaatcgcttgaacccgggaggtggaggttatagtgagccaagatcacaccattgcactccagcctgggcaacaagagcgaaatgctgtctcaaaaaaaataaataaaaatgaaataaaataaaatccctgttttcattcagccttaaatagttgcacctgggtgtgatgggcatacaggagttcattatatattactctacttttctctgtgttttaaactttccataataaaatttaaaaacaaatctctgtttaattccaatagaaaaacaaataaatatcagtggtggtaatgggctctgaaggacattatatatatcaaggtaaggggatagggatggaagcactcttttatccagggcagccagctaacatgtgtttggtaagggcacccttaggaaaaggcctgaaggaagtcaggaataatctgagagtggccatatgctgccttggcatgagaattatgaacagggaagagcaaaagcaaaaggcccgtagcaggtagtgcttggcataggtggggaggccagtgtggcttgaatggagggaacaaggcaggtagtagaaggtgaagtccctcccagtggtggcagggtgcctagctcacataggagctgtcggccattgtcagcactttggtttgctctctgtgaaagatggaagccgttggaggtttttgtttttttttttgacggagtctctcctgacctcatgatccgcccacctgggcctcccaaagtgctgggattacaggcacgagctaccgtggccggcctgccattggaggattttaagcagagaagtgaaatgatctgacattttaaaggatcaccctgcatttatccatggaaaatgaggaccattaggatgaggtaggaggccattgtagttgtccaggtttggaccaaggtgggagcagtggcagtgatggattagattctgtgcacatttggaaagggaatcttacaccatgtgctgatgaattggccatggagcataaaggaagagatgtcaaggatgacttttggacctaattcctcttgtctgctattcccctaaaaagtgtacttcagatcagcctggatcttttttttttttttttgagacggagttttgctctttttgccgaggctggagtgtaatggtatgatctcagcttactgcaacctttgcctctttggttcaaacaattctcctgcctcagcctcccaagtagctgggattacaggcatgcaccaccatgcccagctaattttgtatttttggtagagatggggtttcaccatgctggtcaggctggtctcaaacccctgacctcaagtgatccacctgccttggcctcccaaagtgctgggattacaggcgtgagccgccacacctggtgttgcttttttttttttttttttttttttaagaaaatgggagctcccaagctggatgccagagcaggctgttagggtagtgaataaaagggtaccagaaaagtttccttgacatgtctctctttctcctagtgtctgtatgtctgctttattgctcattttaagagaaccaaaattaaacccagagtctggcatcaccctttactttagcaaatacacaaaagtattttcctacctttaggaacaccattgagagtgcctgaggagactgagtcctcacatggccaagccacgtgtgcaagcctaattgcacggaagccctcaactcctaactccaggccttccctgcctatcctattcccatttgaaaaggggcagagtgagtttagaatcacatgttgccaggcactctcagatactgttggtggaactgtaacttaactgtaacatttctaaaagcattttggtgataagtgtcaagaatcctgatatttttatgcccctttgactcagtaattccacacttctgtaattctccaaagcagttaatgtgaaatatagtaaagcgttatatgtcacagaaaatagttttctagaaaaaaacaaactatctaaataaacaagtgttaaagtaaatgttggtaccggtacaacatgggatattgttttgctgttaaaaatgttcacaatgtttggccgggtgtggtggctcacacctgtaatcccagcactttgggaggtcgaggcaggcggatcacctgaagtcaggaattcgagaccagcctggccaacatgctgaaaccccgtctctactaaaaatacaaaaattagccgggtgtggtggtgtatgcctgtagtcccagctactcaggaggctgaggtaggagaatcacttgaacctgggaggtggaggttgcagtgagccaagatcgcaccactgcactccagcctgaatgacgagagaaactccatctcaaaaaaaaaaaagttcacaatgtttataatgtgggaaatgactaatactttagagaaatggacaggttatagaattggacagacaatataatagagatagtgaaacgtgtatctctccatatgaaataccatatatcatgtaaaggtttttttttttttttttttttgagatgtcttgccctgtcgcccaggctggagtacagtggtgcaatctcggctcactacaatctctgcctcccaggttcaaactattttcctccctcagcctcccaagtacctggaatcacaggcgtgcatcactatgtccagctaatttttgtatttttagtagagacggggtttcaccgtgttggccaggctggtcttgaactcctgacctcaagtgatccacctgcttcggcctcccgaagtgctgggattacaggtgtgaaccaccatgcacaggtaaatttttttttatcatactttttctgtattttccaaaacttttactatcatcatatctttcttttaacaatcaggcaaaaaaacattataataaatatagttttgtcaacaagttgctttattctccatggggagacaaccatgaattcatttttattatatattggaagttacttatgttgtgtagtcagtcctttgttatctgcaggtgacatgtttactttgtgaactttcagctaatttttaactgttttgactttctccttgccttctctaaatggcctttcctgttattggttagtgtgagcctggaagacaaacatgaatgtcattctaagccagataaaatttgaaagtcatgagcctgggaggcagaggttgcaatgagtcgaggtcgctctactgcattccagcctgggcaacagagcaagaccttgtttcaaaaaaaaaaaaaaaattgaaagtcaaacctgtagtcccaaggccactgtactgacttttaaagatagtactatcgaagcagtaggcttatatagctttccttcttgctatttgtgagataataaggttcctccataattgtatgtcttaacaggttgagagacaattgcagctgttccagaaaatcagccattttctctgtcttcaggttttactttataataatttaggtaaacattgcaccttaaactatatatgtatactccaatccacatatatgtgtttatcacataggtatatccctacccaaaaatcttaagaagatacacacaagaatttagtaatgattatctctaggtggcagaattatattatttgaaatgtttttggccagaaaaactgaccagcagtgacttaaaccacaaggctatttattgttttcgtaacaagaaagaagtcagaggcaagcattcaactttggttccatggcctggatagggaccatttatttgagacccaggctttttccttttgttcttccattcagagggtcagcttctcaaccttgagtttattgtttcgtgattgcaggatggtggttgtagctctatgcagcatgctaggtttggaatggaagtgagaggaaacggggcagagcccaaatgtggattgctgtgtgctataagaaatgtttaagtgctgcttctaagggatgagctatgttcatttctcttcccattctccaaagtacagacgatatggccgtcccattctttcctcaggtctcccaccatccgggacatggcgatccgctgcattgcccagatggtgaactcccaggcggccaacatccgctcaggttggaagaacatctttgccgtgttccaccaggcagcctctgatcatgatgggaacattgtggagctggccttccagaccacttgccacattgtcagtaagtggctctgttccctccctactaatgtcccacctgcaagtctagaagagtgtcacttgctgtctattttactacctacaggggcttccctaccttggctctactgtgatatagtaatgtgccaggccgtgttgtaagcgcttgatgagtattaatcttgatcttaactctgttttgactttctccttgccttctctaaatggcctttcctgttatcagtcagttggggtccagcagataaacgtgaatgttatttcaagccagatgaaatttgaaagtcaaatcaatcccaaggccactctaatgactatgaaagaattacagtcaatcctcattattggtggattccgtgtgtatactcactaaaatgtatatacattaataactccacaaccagtactcatggtgcttttgtggtcatttgccaacatgtgcatgcacagaagagcaaaaacttgagtcacccaaggcgcacgttcccagttgtggtggaagaaggtggcaccctgccttcttgtttgagctgtcatgacataaacaagtgtgcttaatgtggcctatcgagtgccatgtttttttacattttcgtgctttttgttggtgatttcactgtttaaaatgcccccccaagcatagtgctgaatgctgggtagtattctacgtgcagaaaggctgtgatgtgtcttatggaaaaaatatgtgtgttagatgagcttccttcaggcatgagttacagtgctatattggctgtgagttcggtgttaatgaatcaacaatatgtattaaataaggtgtcttttcaacaggaacacacatacaacaaggttatgtcttgatcagctgatgaaaatgttctgaccagagacttgcaggaatctagttccttatctccatattttccctaagagccatggttcagtattcttgaattcagtgtttatggcaactttatagaatgtaactatcaggaataatgagaacagactatctcattatttcccccatgttactaaagaggaaattgaggcacagaaaaataaatacaacaacttgcctgaggacacacagtttcgatgtagtggaaccaggacttgcactcgggcagtcgagcccagagttagtttagtgtccccctcctctggactgaccaggagtcctgggttctgcctgcgagcacgtaacaagatgtttacttcatctctatggaaatttttaggcatcgagttatctttgcacatagttggcgttcaataaatgaatgaattgatatttgggcctttacatcattgcttgagcgcaggaagactgtctagcccaagctgtacccagtgcattcattcctgagtaatttaataagaaaaactgtcttccaaagatactgacatgcttttcttagattttcacagttaattatctctgatgtatgtgtgtgtgtgtgtgtgtgcacgcacgtgcattttttcatccccatttctaaatcctggtcttatgaaaaatgtgccttgtgttcccccagcaactattttccagcaccattttcctgcagccatcgattcctttcaggatgctgtgaagtgcttatcagagttcgcctgcaacgccgctttccctgacacgagcatggaagcgattcggctcatccgcttctgtggcaaatacgtctctgagaggcctcgggttcgtttttccccaccttactcagatgggcagtgaagggaaaaggtcatggagcagaaattcttgctcctaacaaagagctttccagctactcttttagaaatgtgtgtttgccctaaattaggtgtttatttcaaaatgctgccatgacagggagttaggccttttcattatttggtatatgtgaaattctgtattttattcatactgaatctatggtattctacaaattgtttttgtagaagttagttgtattttagcttttgtattttggcaaagctcaagaagctagacgtttctatttgaaagaaaacaaacctcccttgtaggaaatggcattatgtctttgtaatgtgcctgagaaatcatatttaaaaatcaccttttgttttctcctgaaaatgatggggtttttgtttgtttgtttgtttttttgatgtgtctcatctttctaaagaggcctatttggtttaaatgacagagtcccaaaacactgaaatagggtgaaaacaagtccatctaaactatgatgtcctgtgtagatctctacttaagtttcctttacagaaagagctataaacctgtaaggtgatatgtctcatctcttacaacagctcactaagatgtgatgataatgggagccaatgttgattgagcacttagtacttgttgggcaccattctaggtattttctgtatgttgattcatttagtccccatgtcagacctatgagatgtaattatatcccattgtacaggagagttactgaagcacagagagaaattgcctaacattacataaccagagttgctaaagaaatttcagtaccacttcaagagtggttacagagcagaggggtcaaaatcccagaaatagggcagagagtagggctatacatgcagactgtagaaagactgccaggtcctagctgtatgaccttgagcagcttactgaagctcttgatgcctcagttaattcatctataacctaggaccattgtttctacctgccacttggaatccttgtgagaattgttaatccatgaaaagaactttaacagtgcctggcccatagcaagcactcagtcaatagtagctgctggtattattttaagtaatgtgtatgacagtaacattccagaaagacctaagataatgatacatcctggatattttgtcaatactatttgacctttaagctcttcttagtataacacctcccacccccaggactcttgtgatctgccccccttcaacttgttctaaaacccgcagaggtccataggtttgtactgggaaactgctcatatgccctttgggacagataatgtctttgtgtagtctgttcccactgtacccttgctgaatggagatttttgggagagaaaaatgtgtggggccttaatctgcatatagttccctttcagttccttccttttgcatgcttagtttacacctgagatgtgatttttcatcctaggtgctacaagaatacacaagtgatgacatgaatgtagctcctggtgacagagtctgggtccgaggctggttccccatcttattcgaactctcctgcatcattaatagatgcaagttagatgtacgaacaaggtaaccatgttcccgtgcggtggccccttacatcactgaaatgaacctcagtcacttgctcacctgaccccactctcttctctgttgttctcttctccaccattctctcttctgtgcctgactttgtttcctccaggggactcacagtcatgtttgagatcatgaagagctatggccacacctttgaaaagcactggtggcaggacctgttcagaatcgtgtttcggatttttgacaatatgaaactccctgagcaactgtcagaggtaggtgataactacagcactgccctaggtatgatggagaggaaagcctttctggccggtatttgcctctgggggctgcatcatcgtctacccagagttcttaaatactgagcaacttaaggttttaaaaatggaaacacctttctgatactctcctaccagtatcagctagtcctgagtgactctccccatgttcagaagaatgagaggaaatacatctctgtggtctgctgcttggccctcaggcattgcaccttccagttcagcagggctcctgactggtcgttgtagttgttttgttcatatcaacctctgagcagtcagaaagtggaatgtctctggccccttaagggtttttaatgaagttgcatttggagatgatgttgaatattaagccttttttttaaaaggaagtttgatgcctgtaggtatttttatttgtcccttagaggtacagggatagtgaaagggtattctaggctcaggatttttagatggaaaagtaacctttttatttcttttgggaacaccattccttctctcaccgcaacataaaagtgacatatgcttaatatggaatattaggcaaacacaaaaaaattcttccttttaccatccaaaattagagttaatgtttttgcaaaattttctccatcttctacatggtttaaatatgattcggaggccaggcacaatggctcatgcctataatcccagcattttgggaaggtgaggtgggaggattacttgaggccaagagtttgggaccagcctaggcaacatagtgagaccatatctcttaaataaataaataaatatggttgaggtcatagtatagatagagttttctaatctttttaaatttaaatatgtttttcctcattataaaacaagtagaactacagaacacagacaaaaacaaagaagaatttaaacactcacagttgcggtttttcataggcagccaccgttaagaccttcaagtgttgctttcatctgtgtgtccacccacacatgcatttgtgatccacttttttcttctatgaaaatagaattccaacacacgtatataaactacttcttaaacttaatacatgagtattttttcgtagccataacttttcttctagaatgttttgtttgtttgttcctttgctttgtttcgtttttttgagacagagtcttgctctgttgcccaggctggagtgcagtggtgtgatctcggctcacagcaacctctgtctcctgggttaagcaattctcctgcctcagcctcccaagtagctgggactgcaggctaatgccaccatgtccaggtaatttttgtaatttaaatagagacaagatctcaccatgttggccaggctggtctcaaactcctgacctcaagtgatccacccgcctcagcctccaaagtgcagggattacaggtgtgagccaccacacccagcctttcttctacaatgttgttttaataatggctacaaaatagtcttagttgtggatgttccacagcttatgaacatttaggttgctttccggtttttctggacagcactgaaatgaacattttttgcagctacacttctagtggtggtgttttcttctttaaagacaagtggcccaactgccaggtttggggcctgcgtattactaagccttttgatacgtaccactaagctgacctgcagatatctctgtagccatttacacttctgtcagcaatgcatgagagttcctatttctccatattcattccaggtcttctcattttaatttgttttagtcattgctaatttgataagccaactgtatcacattgaaaaagtgtttcaaactgctagtgaggtggcatattttctctcataggattgatcattcttaagaattgccttttatgaattcttttatgaattactcttagctcatctactggattattcatctttctcctattgatttatgcatttttaaatatataaataatgtagcatatgcatacatgagttgcagatgatttgcccactttattatttccttttcattttggaaaatttagcttttaagtaaccaaatctatgcgttttttatttatttttttattccacttctggcttccacttttggcatcattaccataattttataaagatccctctgtatatcctctgtacatatgaatgtattaacatttttaagacgtattcttgatacatatcaccaaattgctttctacaacagttttgccaggagtgtacaagaatgcccatctcactgcagggagaatagcttttaagtgtcatctttttgttttcccagaaatctgagtggatgacaacaacctgcaatcacgcactttatgctatttgtgatgtttttacccagttttatgaagctttgaatgaagttcttctttctgatgtatttgcacaattgcagtggtgtgtcaaacaaggtactctttaagcctctaggcatcatttttcttacatagtctttaatgagaggttagttttttcaatatttaaaagcatggatgtagtgccatggagtacaatatataatttagttggtgaaatgtatacgttttaattacagtataaaaaacagtgccccccccaagtcagttcataaagcatttcttaaagatgggatatagttatttttgtattctacaagatgtaccttcatgtattatactgttctttttacttttgtatatgtttgaaattttctctagtaaaatgtttttaaaatgtattgtttcagtcaagatcaacagcttcatcaacagacaattattttagagtttgtcaggaaaaatacccagctagcacattagaactggattccatagataattttggcttagggcaagaaatttagttacatttttgaaaaagtgacttaattttaaaataaatgacaaaacatttgatattgttcaggtggcaaaaattggaaatgtaatgtatgagtgactaaatttttgaaaacctggtctaatgttttctctcttctattaccatttttcatacatgagccacttaatttaaagtagcaaaatgttgacctttcttctttagcaataaaactatgataaacaattttaactcttcaaaaaaattttaataaaaattttaatactgtctgtagcatggcttcattaattaaaagcctagaaactcaccagttgctgtctccaactcacaatatacagtatttgagacctggttggcatcaaaatagcagtagaagtttaatgatagatactgctttattttacagataatgaacagttggcgcgatcaggtacaaattgcttagaaaacttagtaatatccaatggagagaaattcagtcctgaagtctgggatgaaacctgcaactgtatgttggatattttcaaaacaaccatcccacatgtgtaagtgttcatgcagttgttcccgtttatctctgtgttcagtggatgtcttaaagctcctgattgcctttcacattgattattttttttctctatttttttcttcagtttgctgacatggagacctgtaggaatggaggaagattcatcagaaaagcatttggtaggatttggggtttttctttggttgtcttttcttttttctatcttagtaaaagatcaataagcctgtatagtttgtactttttttaatgggaagtgagtaaaattataagatctaaaaatagtatatattcataatatattttttagaaagtccagaaaagcattaagcaaataagtaacctcaccaagtaaaaagcacagtttacatttctagctgccgctttgtgtgaccgtgcatgcctaggaaaaccagccatatttgaaatgagggatcagttagcatataacaacatctgagcatttttccatattttaaacggttctttgagagcagtcttttcagtggctgcatagtattataatttctttacttctcccttatcggactctcaggttagttctaggctttcaacattgtaaatagtgctttggcgtaactgtgcttgtttgttgccctcctaaattaatagtgctttcctcttcaccaaagaagtggtagttcttactttttgtgtgagtccacataaagaagttttaattcagatctcacttttaaatactttggtttacagagaggagttgaattaacttttattcctaagtgactctaagaccattagattttaaaaagcatttgggatacagcaactgtcttctgctgttaaatttttttattttttattttattttatttttctcgagacagagtctcgctctgtccccaggctggagtgcagcagtgcgatctcggctcactgcaacctccacctcctgggttcaagcgattctcatgcctcagcctcccgccaagtagctgggattacaggtgcccgccaccatgtccagctaatttttgtatttttagcagagatggggtttcgccatgttgaccaggctggtcttgaactcctgacctcaggtgatccgccttccttggcctcccaaagtgctgggattacaggcatgagccactgtgcctggcctgttgtcaactttttaaaaaactagttactgcactagtaatttatctttgaacttgctcgcataaaaaatttgtcacacttattgttaaatcctaatatgtagagaaatgtcctctgggttggaataggaaaatagggaattttaatgggaggagaagtaatttaaattcttaatctctccattgcagcctgtgaggcatgctacattaagcatgtagtatcattttattttgagctaagcaaggcacttaaatacaggctggaccagccgtgttaaaacaggcacatctctgcccaaattatcatgaagaaaagtgagcattgtgtttccctctggtttacatttaggatgtggatctggaccgccagtctttaagcagcatagataaaaatccctctgagaggggacagagccagctctctaacccaacagatgacagctggaagggtagaccatacgcaagtaaggccactttttaatttgttttaaataagtaacatgtttatgtgattcatatattcagaaggcacaaaagggtaaacatgataagccttcttctgccctgtgcctcagtctgccagttctctgtagcagccaaggttacctgtttctctgtacctttccagagtcattttatccatgtgcaggcaagtacatgcacatatacattcatatacatacatatatagtacatacgaattttctccttttaccagttatggaatagtacattccatatacattgacatatacattcacacacatacatatatagtacatatgaattttctccttttaccagttatggaatagtatgccttattcttttttcagttaatatattttagagatcattcaaaatcagtacataaggagctttcacgttgttttatacgattgtctattattccagtttgtagacatgcatttattgcttaattgagttgctcttaacagacatttatattacttataatcttttgctgttaggagcaatactgcattgaataacccaatacatatgtcatttgtgaatttatgtaataaattcctaaaaatgtactggagtcagtggataagtgaatttgccatttttaaatatttccacattgctatctattacatttgtagctgtttacgtgatctttttagatgaaatacaactttggactaatttaacttggaattttcaaattatgagtcaaattgaatagtttttcgtatgttaaagcaccacttctgttttcttctctatgaactctgtaatctttgctcattttctgttgattgttggccccttttttattggtttggaggagctcttatgtactagaaatcctttttctgatatgagtttcaaattatttttgccaaattgtctcttaatgttgcttatgatgtgttttactgtcatttaaaaaaataagtttaacagctgtcatgtaccaggcactgtactgtgtgttccatgtgtattgtttcatgtaatcctcatagtagcctttgaagaggtactgtcttacgtttgagggaactggggcttagacagatcatagaacttgacaacatgtagtagagtggggattcagacacatttttggcagcctgaggaatgggaacttgtgaaggttgttctggtcctttgaaagttgtgtgccccattgtttgcctttatagcagtcccaccctgtcctcaacatgctaggccatagctgttaacattgaagttaacttctgaagcagcacatttgaccaaaacagtgtgcggtcacctttttctttagaaggaataaaagtagtcacccttgaaattcattaaagaggtatcgtgttgggactggcatgctgtctttcactaactgctgcagccagcttctctccaatgcccagtgatagaatgatacctttttcattttctctttttttagagacagggacatactctgtctcccaagctggagtacactagtgcaatcatagctcattgcagccttgaactcctgggctcaagcaatcctcctgcctcaggctcctgagtagctgggactataggcatgtgccaccacattcggctaattattttattttttgtagagatggggtctcactttgttgcccaggctggtcttgaattcttggactcaagccatcctcctgccttggcctcccaaagtgttgggattacatgcgtgagccaccatgcccaggctctttttcttcacgagctccagataaagtagttagtttctgtgtggaggccaagtatacatttctttcaataggagaagcactctccgtgcagtgagagtctacactctgagaagtacctaggactcaatccacctcccattcccccagggaacagtgcctttgctgctcccagtctcccagctcagccataagctcaggcagacaaaaatctttgcactattattatcgtttcctttttatttttggcccaaaatgttttaattgacttggcataagttgaatgtacatcttctggaactccactgtattaaaaaaaaaaatttaaaacaatctacatggagaattgttacgtgtttttataatttcataactggcgaggtgcagtggctcacacctgtaatcccagcactttgggagaccaggaccaatggatagcttgagcccaggaatttgagaccagcctgggcaacatggtgagaccccatctctaagaagaaaaaaaaaattttttttttaatgaaaaaaatgaaaaaataatttcacagccactttcaaaaacttaaagacaactcaacctccttgttttctatcactgaaatatttaatgttttcaacattctgattttataaaataagttgggaaaggaatctctactgttactgtagacaaaccagtgaacacttatgatgtatttgacatgggccacccttgggccctcagggattgagaacacaaagaggatatagttagtctactcagtaagcagaaaccacaccgctaatttgaacagggaaaattcaatattaagaattgttggggccgggcgcggtggctcacacctgtaatcctaacactttgggaggctgaggcgggcagatcatgaggtcaggagttcaagaccagcctggccaacatagtgaaaccccatctctattaaaactacaaaaaaaattagccgggcatggtgccgggtgcctgtagtcccagctacttgggaggaggcaggagaattgcttgaacctgaaggcggaggttgcagtaagcaaagatcacgccactgcacttcagcctgggtgacacagcgagactctgtctcaaaaaaaaaaaaaaaagaattgttggcgaggcacagtggctcatgcctgtaatcccagcactttgggctgaggcgggcagatcacctgaggtcaggagtttgagaccagcctggctaagatggcgaaaccccatctctcctaaaattacaaaaaactagctgacacagtggcgcacacctgtaatcccagctaccagctacttgggaggctgaggcgggagaatcacttgaacccgggaggcagaggttgcagtgagctgagatcatgccactgcactccagccagggtgacaaagcgagactccgtctcaaaaaaaaaaaaaaaaaaaaaatgttaactagtcaaaggttgttaaccactaagaggaataaaagaccactcttaagggatacagaagtagaaaatgcagaaagcaacaaaactgagcttcttggccaggcaagcaatggctcacacctgtaatcctagcactttgggaggccgaggcaggcagatcgcttgatattgtggcacaggagttcaagaccagcctgggcaacatgaggaaatcccatctctatttaaaaaacaacaacaacaacaacaaaaaaaaaaaacccacaagcttctggcctcttcagaggggctggctactgcaggaacctgaaacgtcctctggttagggcacagtccagtggtggtctttaggagtagcccactgggtggcagagaaacttgctggaggacacagaacctgcatagctgattccctcactttcttcaggtctttgctcaaatgtcacatttttatagagacttttcccaactagtttgcttaaacgtgcagtcctaccctgacactttctatccctgtctctacctatcatcaatatttaatatataatattcttaaaatatttcatttattgtctgtcaacaccatgggagcagagatttttttttgtccagtttattcattgctgtgccacaacatcaagaattgtgccttgactgggtgtggtggctcatgctgtaatcccagcactttgggaggctgaagtgggagcatcacttgaaaccaggagttcaggaccagcctggagaacgtagtgagaccccatctcttaaaaaaataaatcatgccttgcacatagtaggagctcagtggatatttcttcagtattggctgaatcattattagggttaatctttatcatctaacatagatcagaaactgtttgccagcctcctcatcaagtgtgtggtccagttggaattgatacagaccattgacaacattgtgttctaccctgcgacgagcaaaaaggaggatgcagagcacatggttgccgcccaggtaagaacaggaggcctcaggaagagcatccctgtccatagggaggttgctttgatgtagtggtgtgcggaagccagcttgtactggctttccagagcctgtcatgctcatctctttccaacctcacattcagtgatggcatgttgatgcttaaaattggccttgatgggagttatttacatcagagaaaaacagcaaacactaaacatcagggcttcattttttttatgtatataccccagagagtgagtttatgagcataccactgctcaaatgccaccccactagtgttagttatcacaggaactattccccacaattgatatacagttttttttctggtttttttttttttgtttttttttttgtttttttgagacggagtctcgctctgtcgcccaggctggagtgcagtggcgcgatctcggctcactgcaagctccgcctcctgggttcacgccattctcctgcctcagcctcccgagtagctgggactacaggcgcccgctaccacgcccggctaattttttgtatttttagtagagacggggtttcaccgtgttagccaggatggtctcgatctcctgacctcgtgatccgcccgcctcggcctcccaaagtgctgggattacaggcgtgagccaccgcgcccggcctgatatacagtttaatcacaaataagtgaggaggaaaagatatatataaagatcccagtttttccttcaagaatttcgctttttttgttttctatatgcaactttctacatatgggattcttttcctttttttctttttttggcgagacaaagtctcactctgtcacccaggctggagtgcagtggtgcaatcacagaatcacaggtaactggggtttcaacctcccaggctcaggtgattcccccatctcagcctcttaagtagctgggactacaggcacatgccgccatgcccagttaattttttacattttttgtagagatggggttttgccatgttgcccagcctggtctcaaactcttggactcaagcaatctgcccacctcagcctcccaaagtgttgggattgcaggcgtgcaccaccatgcctggcctacatatcagattcttgaaaacatagagaattcagtgtccaaaagttggacagttatcctacaccatgggttacaaatgtcagtgcttcaggggctagcagatcctgtgagagtgagtgagtgaggcaggctgggtaaggattgtggtaaaccagaaatctctagcccagtcaaagcggctgccacctctcagctttagcgcccgattaccatccaagtgggttaagttgtgacagtttctcgtgtttcaagagtagccaaaatcaagattttttttcatagaggaagtcatgttttaaatactagcaaaagtaatgtaaattttattactgctggaaaaaatacagctgtgagccagaggctgtccttttgattttaaaattttaggcagcttgttcagtaaagtttcctagggtttcatacatgtttcaagaatgcattcctgggctaggtgcagtggctcacgcctgtaatcccagcactttgggaggccgaggcaggcggatcacgaggtcgagtctgagatcattctgaccaacatggtgaaaccccgtctttactaaaaatacaaaaatgagctgggcatggtggcgagcacctgtaatcccagctagtcaggaggctgaggcaggagaatcacttgaacccgggaggcggaggttgcagtgagccaagattgcgccactgcactccagcctgggcgacagaaactcttgtctcaaaataataataataataataattcattcctgtaatgaaataattggagacacacacactcctgcttatgcagtggaggcagcactgatgaaactgaaactttggccagccaagcctgccatcatggaacggctcagtgtgttccttcaccagccagtgagcagagtctaaatggaaatgtttcagggtgttggggaataagtgtgtcttatagacagggatgacttttggagagtcatgactgccgttgtctgcaatcacaatgcccagagcattccatcttcttcattagctcttctatcctctgtcctgtcctctagcaagacacgctggatgcagatatccacatagagacggaggatcagggcatgtataagtacatgtcttcccagcacctcttcaagctgttggactgtttgcaggaatcccattcattctcaaaggccttcaactccaattacgagcagcggactgtcctgtggcgagcaggtaaggccacacagcagataagatagatggccacactggtcaccttcctaaaacattaaagtgcttggaaaatgcccaaaattttaaacatagctagaataacttaacagatattttcatgcttgagggggagagaagggaaatgttggataggtttcatcccagtacatggtagattctcagtacgtatttgataaaaagacaaattgaggccggatgcggtggtccatgcctgtaatcccaacactttgggaggctgaggcaggcctcagccaagatcacttgaggccaggagttcgagaccagcctggccaacatggcgaaaccccatctctactaaaaatataaaaattagccaggtgtggtggtgcaaacccataatcccagctacttgggaggccgaggcaggagaatcgcttgtacccggaaggcggaggttgcggtgagccgagattgcgccactgcactccagcctgagtgacagagcaagactccatctggaaaaaaaaaaaaaaaagacaaattgaaagttggagaattgaattgatctagcaagtcaaaacattttatgggctgggtgcggtggctcacgcctgtaatcccagcactctgggaggctaaggcaggcggattgcttgagcccaggagttcaagaccagcctgggcaacatagcaaaaccccatctccacccaaaaaaaagtatatgaaaattagctgggcattgtagcacacaccatactcaggaggctgaggtgggagaatcacttgagcctaggaggtggaggttgcagtgagccaagattgcatactgcactgcagcctgggtgacagggggagaccttgtctcaagaaaaaaaaaagaaattttacattaaattaaaagttaaatatgacataaaaagtgtggtagtctaggaaaaacagaaaccattcatcaattttccaagccttatatttactttcctacctccaaaaataaatacaaaaaccctggaggtaaatacattttttttccaagatggtggtgggattctcattattttgaactttgcatacaagtgatactttatataatttttgtattgttaatttttaccattactttttttttttttttttttgaggcagagtcttactctgttgcccaggctggagtgcagtggcgcagtctcggctcactgcagtctctacctcccgggttcaagcaattctcatgcctcagccttccaagtagttgggtttacaggcacatgccaccatgcctgactaatttttatatttttagtagaaacagggtttcaccatgttggcctagctggtcttgaactcctgacctcaagtaatccactcatcttagcctcccaaagttctaggattacaggcatgagccactgcacctggccttgttatcattactttttgtccccaaatatttattttaacccacaattaaagaatgtcatttttctctacagccttaaaatatccagctcttttatgcctttgcctgtaataagattttgtttgtgagagtcgtttgcatatctcttaagctgattggtactagtttgtttttaagaatgtgttcttttttttttattatttatttttttattttttggagatggagtctcactctgttgctaggctggagtgcagtggcgtgatcttggctcactgcaacctctagcctcctgggttcaagcgattctcctgcctcagcctcccaagtagctggaactacaggcacgcaccaccacgccagtggtctcactctcttgacctcatgatccacctgccttggcctcccaaagtgctgggattacaggcgtgagccgctgcgcccagcctagaattcttaagagctgttacatttgaaaagacaaaactaatggtttcgccagccaataagcaaagtctaaatggagagcaggccaggcaaggtggttcacacctataatcccagcactttgggaggctgaggcgggtggatcacttaaagtcaggggttcaagaccagcctggcaacatggtaaaaccccatctctacaaaaaatacaaaaattagtgaggcgtggtggcgtgcgcttgtagtcccagctacgcaggaggctgaggcaggagggtaacttgagcctgggaggtcgaggttgcagttagtcaagattgtgtcactgcactccagcctgggtgacagagcaagactgtctcaaaataaaataccaataaataaatgaagaacagtacagggcattgaaaaatgaagttatcttgtaatacagaggatgacttctggggagtcgtaactgccttcatctggtatcacaaacgatctgtattaagaatatatataaaatgtttcaggccaggctcagtggctcatgtctgtaatcccattcctttggaaagctaagacaggaggattgcttgagcccaggaatttgaaaccggccagggccacatagtaaaaccctctctgtacaaacactaaaaaattagctgggtgcggtggctcccgtaatcccagaactttgggaggccgaggcaggcagatcacttgaggtcaggagttcgagaccagcctgaccaacatggagaaaccctgtctctactaaaaatacaaaaattagcccggcatggtggtgggcacctgtaatcccagctactagggaggctgaggcaggagaatcgcttgaacctgggaggcggaggttgcagtgagccgagataatgccattgcactccagcctgggcaacaagagtgaaactgtctcaaaaacaaaaaaaaattagccaggcatggtggcacacatctatgttcctggctactcaggaggctgaggcaggaggatcattgagcccagaaattggaggctgcagtgagctatgatcatgccactgcactccagcttaggtgacagagcaagactatctcaagaaaaaaacagatgtttcatatttcataaaataactagatttctagtcatacacagttatcagcattatcttagaaatgtgcactaattatatgactgtctgatctctaggttttaagggcaagtctaaacccaatcttctaaaacaagaaaccagcagcctggcctgttgtttgaggatcctgtttcgaatgtatgttgatgagaaccgcagggattcctgggaagaaatacagcagagacttttaacgtaagaaaattagtttctgattagatttctatctgctatatacaaaatgcatcacagcaatactgtggattgaaaagagtaagagaaaaatacatgctgacactctgacaaatttttttttctttctatttggtgactctcccatttcacttttcttaatgccctgaagagggcagagcctcatctgtttcactgttaagcccttgcttgagcccaggagtggaagggtgctgtgagctatgcatagaaacatggacagtgaaaagtgctccgagcggtcagcaggctggatggaagtcctgactgtggctagagccctgtggccttaggcaggttactatccctcttgggaccaggtcctctttagaattgttgtcagcaataacatcccatcattccttctttccaagaagagtgtaattgaaatcatataaccaggatgtgcctacaaaattatctagaaatccaccaatggggagagagtggaatactgatgaggaagccccagccagaaaagtaggtctttgtcactcagcttcctgggcatcagcaagattctgatgcctgagctttcttttcttcctctaaggtataaaaacagtaacacacagtgctggcaaatgtgtggtaagaatgcactctcctgcgtagctagttggagtgtataatggcatgatctttctggaaagtaggtgagactatataccaggagccctaaagtgttcattctctgtgactcagtaattccactgttatggaatctgcttcagaaaatattttagaaataggaaccaggaataccacatggaatattcactgcagacttatcaggagaaaaaattttaagcagctcaactgtggaatgaataactaagctgtaatatgtcctaaattatgatattatgaaacatagtcattaaaagtgaattttttttttttttgagacggagtcttgctctgtcgcccaggctggagtgcagtggtgcaatctcagctcactgcaaggtccacttcctgggttcaaccaattctcctgcctcggcctcctgagtagccaggattacaggcgcgtgccaccatacctggctggttttttgtatttttagtggagatggggtttcaccatgttggtcaggctagtctcaaactcctgacctcaggtgatctgccgacctccgcctcccaaagtgctgggattacaggcatgagccaccgtgcccagcctaaaagtgaatttttttttttttttttttttttgagacagagtcttgctctgtcactcaggctggagtgcagtggcgtgatcttggctcactgccacctctgcctcccgggttcaagtgattcttctgcatcagcctcccgagtagctgggactacaggcgtgtgccatcacacacctggctaatttttgtgtttttagtagagacaaagtttcacgatattggccaggatggtcttgaactcctgacctcgtgatccccccacctcggcctcccaaagtgcagggatgggcgtgagccactgcgcccggcctaaaagtgaaatttttaagaaataattttacttaatgtgggaactttttcataatacaataatttttaccccaaaaaaagctgcaaaagtgtttttacttggaattttcagcaattggggcattttatttgtttttttagagtcagggtcttgctatgttgcctaggctggtctcgaactcctgggcttacgagctcttcctgcctcagcctcctgagtagctgggactacaggcgagcaatttttcttttgaaatcttagcaaaaaaaaaaaaaactggaaggaaatatgccaaaatattgtcatgtatcccttagaatgatgtagctatttttctttataatttttttcataattttttacatatatcagttaccttacaatgagaataacaagtcataaagtgaaaaaagaattaattaattaaaggaggcaccaatggctcatttcagcttaagcccaaaagacaaatacctacagtctcataaagtttctctaaaggagatatgtagggccgggcgcggtgggtcacatctgtaatcccagcactttgggaggccgagccaggtggatcacaaggtcaggagtttgagaccagcctggccaacatggccctgtctctactaaaaatacaaaaattaaccaggcatggtggcaggcgcctgtaatcccagctactcgggaggctgaggcaggagaatcacttgaacccaggaggcagaggttgcagtgagccaagattgtgctgttgcactccagcctgggcaacaagagcaagactccgtctcaaaataaaaaaaagagatatgtaaatgtcaagtttttggcatgttttttaaaaaagcaattaaatgtgattgtgaggagagaaaggcagttatataattatgagtaataagctcttgtgctacagacattgattgagttcagccctagccatgtgccaggactgagccaagttatgacttaacatatttacttcatttaatcctcacaacaaccccttgagtttggactttttttttttttttttttttttttttttgagatagtctcactctatcgcccaggctggagtgcagtggtgcaatctcagtttactgcaacctccacctcctgagttcaagtgattcttgtgcctcagccacctgagtagctggaattacagatacgcaccaccacacccagctaatttttctatttttagtagaaatgggggtttgctacattggccgggctgtctcgaactcctggcttcaagtgatctgcttgcgttggcctcccagagtgctgggattataggcatgagtcactgcacctggccaggcaattttttatctccattttatagctgaagaaactaaggctcagtgatttgcccaagatagcacagccagagtgggtgctcaatagttattgcagtggctgggctcagaggctcaggctcacatctataatcccagcactttgggaagccaaggcagacagattgctgagcccaggagttcaagaccagcctgggcaacgtggtgaaaccccatctctactaaaaatcaaaaaaattagccaggcatggtggcgcaagcatgtagtgttagctgcttcagaggcagaggtgggaggatcagcttgagcccgaggaggtcaaggctacagtgaaccttgatcacaccactgcactccagcctgggccgcagagcaagaccctgtctcaaaaaaaaaaaagtaattaaaaaaaacatgttaaaataattttaaaaatagcacaagaatgaatagttctcccctgaatgtgagatgttaatcaattgtttgatatgcctccccctctctaattcttctagtgtttgcagtgaagctcttgcctatttcatcactgtgaattctgagagccatcgggaggcctggacaagtctcttgttgttacttctaactaaaaccctcaaaataaatgatgaaaaggtatgaacaagtaaactctgaccaattttcactaggacataaagtttgggttggctttttactcaagagtttgcagtaactattttctcagttctcccaaggatggttacgtgactagcaccattctagatgcattggagagaagttaatccgttatggacaatgggtgccacaggatattagggctttttgcctggaagaacagtagttgagaacggctgaagtgtagacctcatgtgttgctgttaggaatggtatggtgagtttcagtgcaggaagagagggttaagattgtgaagcaccagttttgacctaggaacctgctttacaaaataaaagagctgttgacttttggcagcaagactatccaaatttaattaaagttaaatataactgaaagaagctttaatttgcaaggtttcttcaacttctttttttttttttgagacagagtcttggtctgtcacacaggctggaatgcagtgacgtaatctagctcactgcaatttctgcctcccaggctcaagcgatcctcccacctcagcctcctgagtagctgggaccacagacacgcgccactatgcccagctaagtttttgtatttttggtagagacagggtttcaccgtgttgcctaggctggtctcgatctcctgagctcaagcgatccacctgcctcggcctccccaagtgctgggattataggcgtgaatcactgcgctcggccccaactttctaatagcaagaaaagcaccaatattgtaataagttccagggtgagattaacacttctgaaaaactggtgcccaaaaaaaaaaaaaattgtctaattttatctgtttctctcccacctcaagttcaaagcacatgcttcaatgtactacccctacttgtgtgaaattatgcagtttgacctgatccctgagctccgagcagttctgcggaagttcttcctacggataggtgttgtgtataagatatggataccagaagagccatcacaggtaccagcagcactgtcaccagtgtggtagccctggctgcccaggccagtgctgcagctctgcagaatgttcagcatgccatttctgactggcacatctcgtgaagtttcatagaaacaaggagttggcatcttggatctcagaatggcctggaaacggatggcctctacgctgttccatcacagtctccaactaaggcttatggtatttcattaaactgttgcatacccagttagcacagtaggtggggagtctgcttcatttctatcattccatttttctgattaaactgtcaaatctgtcattgcatatgccatcgttttctagcaaaatcccatgattggctataaacgttttgtaagaagtcactctccttgaaaatactgaacatagctgtataggtttgtgattattagagaatatgttaataaaacttcttgtaacggctaactgccacctaaaatatgctgggttttctgttgtttgagtgtgttagagaaatttgaatgtttttgtcagttacgagtcagccgtaattagattagtttaaggacaggtcaggattagagaagagttgtttttgtgttttgttaatgtctgagtgatttttaaagtattttacaaaaagatattgaaaatttggttgaaggcagagtttagtaattaagttagaattaagagttttgcgaggttaaaaaaatgtgcctcgtggatctccctgttttagtaacatggagagaaaaagtctacacgaaaaagtgaacaatttaatgaagatgattagccttccttgaaataagtatttgtggatgggtgttaaattaaaatttccagaatacactgtccatctcacacactctgaaatctaatatatgaagtagtaatgaaaatgaagtagtaatttaaccagagttcatttatccttgaataaacctttttattttcacctcagaaaagtgagtgtactggcagttagtgtcactgctttgcacagtccccattaaaggaccctccagagagggacagtaactgtgcatgagaagccgctcccataagcctcctcagccagatgtcatgggtggaactggagctgtgtcggggccagcacagctgaactgtgacaatggcaggaggtggcatgtgcccagcacttccattaatctgagcctaggagttgaattctttggcaaggttggattctgaggtccttattatgttaatgatggtgcaatactctcacctgcagtagaactgagttctgctgcagcttgtgtaaaagtgggcagtacacaagtacgtcccaaagcctgtgagcagtatacgtggatgctcacccatgagaaggagcacacacgcctcattctctgccctcacccactgctcacctagagcatcgctgagcgttagacaaagtgttacacagaatgattaaaactttcagacttctacctatgctctttagtcctgtaaattgggttgtattgatgtcaactctggtgccttagaagttagtagtttgggaacctatctgtaaaatcagatgttttttctttgtagagaaggatttctggtgcttttgcttactaagagaccgatattcttaagttgttttcttgttttaacagccttgagaaatgtttggttttggccagcagaattcttgtctacttttttctttcccaaaaagtgttttttaatttctctaccaaagaaaaaatgagcaggtttaggtttttacatgacttatatacattagataaaaggagctgtataatttagcaggaagggactatgggagaatactttactgtgagtggaaaatgttagcacatttgactggtttgccctggaatccactgcacctttacactgcaccatgaaacctacactccctggtatcatagcgcgtcatcacctcaacaagtcagtcgtctccattgatatttgtacaaaaggtatacatggggaacacgtgttcattcattaagtccatcttgcgtgcagctatatccctgattggttatttttcctttccttctgaggttctcatgtcattttcttcatcggatgtgactaaaatttttctggtgtcttctgccctctctttaattttgcctcttgaggggtagcagatgtgtcagtgcattttattacttgctgaaacattcaggcttacatttcttattagtttagtattttaaaagatttaattttctgaatgaggcatttgaattgtaccagcaatggacttttaaaaaattggatgtaaaaccattcagggtgatttttcttgtcagtggacagtgacgaacagagatttgaaatcccttacctccaataataagccattcagcctaaattcatttttatgaataaatctcttctttctcatggtaaatgtggcttgtgccactcaaacactagtgaaagggtatgtacaaccgcaacatcaggccaggacaccatttatttaaccaagtaatggaggagagtgaaacattttccaaggccttatttctttttcagaatgctttaagtgttgattatatgtgctgggtctctagagaagtttttatttgttacaatactgctgctttgagcaattttgtttctcttcattgtctgttagggaaatcaccagctttggcatcttaacaacaaacagtggatgggtaatttttatttctgatacgcatctttagagtcaaatatatcttttccctgtactcctcatgtacaaccaaagaacatacattatgaaaattgtattataatatctggaaacacaacattttcctctggcaggtgacttttgtacgaaatgaaaaaaaaaaaacctgtattttttttgttgttcttttgtgattaaggatatacatttagtagtctttgttattaaaggaacctgctgataagtacaagtgtgaccatctcattcaaatgtttgttgttatgatgcaaatggatattggtttcaatagaagctggatccttaatactgcattttctgaattctgttttaatatttgtgttaaagtagacatagctgaactcacatggaatcctggagttttgttatcagcagctttgcagtttgggaaacaaagaaaccaaagctgagtgttttaaagaatgaacatatctggaaatccttgctctcaaaacaaaacaatataatctatcaaaggtgttttactcagtgttctaatttttaaaaaattttatctgcatatttgcatcaaatatttatgtgtaaaatgtatgttttacctccttaaaatgcctaaaagttagttaatagttactttggtttaacctatacacaatgattaagtgcatttaatattggtaatttaatgaaaaccattccttgcccaatggatgtataaatttttgaaagaataagcagaattatataatatgaaatgctatgtaaagttttctatgtaaaaatattatgtataatactattaaaatatcccatgctttgatcaggtggtacatcaataaaattttaaaaagtatagctgtttctaatgtgtagtaatttaaaaaacatatatcaagccgtagttttgggtcagtttatgtccctcaccaatgaaagggggaaaattctagtcatgagattctttatatgcctcttgaatctattaactttgttgttgctagttacaaaatgtaattgtaaggatcaagtagtggctattggttcagccagtacacattgacagctttgaaatattcagatgctaatttatttatttatttttgagacagggtcttgccctgtagcccaggctgagagcagtggtgcaatcacagctcactgcagccttaaccttcttggttcaagtaattctcccacctcagcttcctgattagccggaactatagggccagtagtgagacaccttgcctggctaatttttgtatttttttgtagagttggggtttcaccatgttgcccaggctggtcttgaactcctggcctcagtgatcctcccaccttggcctcccaaagtgctgaaattacaggtgtgagtaccacgccaactgagatgctaatttttaagtcaatgtgacaaatactaatcagattcccataacagtgtttaggatctacataaatttgattctggacatagttctatacacaagggtaagagactgacagtgtaattccccaataattaaactaaaggtataattttccaaatcacttttagtaacacaataaattctaactttttttaaaaatagagatgggggtctcactatgttggccaaattggtcttcagctcctgggctcaagtgatcctcccacctcagcctcccaatgtattgggattataggtgtaagccactacatccagccaattctaactttttaagtctagggtctggcatggtgggaggattgctagaagccaggagtttgagaccaatctggggaatgtagtgagaccctatctctacaaaataataatagcaagtgtggtggcacacgcctgtagtcccagctacccaggagactggggtggggaggactgcttgagcccaggaggtcgaggctgcagtgagctttgtttgtgccactgcacttcagcctgggtgacagcctgtctcaaaaaaacaaaaaccaaaaaaaccttctggccacaaagcaaaaagttgcatagccacggtaaagatttagttggttataaagttgtagttattgccactttaagctaatacttcgttttggagcttttatacacagtatttttgttagggatcacagttctgcaacctctgctccaaaaagaatgagttttcttaaagggagcttaacttctgaagtcttagtgattcataggtgtgcatagaatgtgtgattccacatcccaggtggaaagaaagcaatctttccacctcagcctcccaaaatgctgggattacaggcacgtgccaccatgcccagctaggtttttgctgaggttaacctcttatctcttgtccctccctccaccacaaaaaccacaaacaaaaaacacttctacagcttccttcttcttggctgtctttgtcaatgtttccaatttttttttttaagagacgtgatcttgctttgtcacccaggctggggtgagtggcctcattgcagctgactgcagcctcaatttctcgtgcccaagccatccaaagttctttgttctattatgtggacagacacgaagggcatggcatttgttaagttctgttaaagtcttctctgcctctctcatgtctgtatttttgtggcccatgtcttctatgtggttgagttgttccccttgtttatccagtattgtgatgatcttgattcctgcatcctgagactcaatggctaaacccaggattctccttgtactttctagagactcatcagcaacttggtgaaccctcagatgaattctttttgattcaggatcttgctgtggctcccaggctggagtgcagtggcagtggcaccatcatagcttactgcagcctcaaattcttgggctcaagcaatcttcctgcctcagcctccccagtagctgggactacaggcacacctcactatgcccagctaatttttttaaattttattgtagagacagggtcttgctacgttgccccagctggtctcaaactcctaggcccaagtcatcttcccacctcagcctcctaaagtgctggaatttacaggcatgagccactggacttggccctgaatttcttttaatgacagattatccatgatgaatcaaaactatcaggcatgggccaggtgtggtggcttacacctgtaatcccagcactttgggaggctgaggcgggcagatcactagaggtcaagagtttgtgaccagcctggccaatgtggcaaaaccctgtctctacgaaaaatacaaaaattagctgggcatggtgacacacacctgtagtcccatagtcccagctacttggaaggctaaggaacaagaatcacttgaacctgggaggccaaggttgcagtgagctgagatcacaccactgcactctagcctgggccacagagcaagattcctcaaaaaaaaaaaaaaaaaaaaaaaattacttggctaatttttgtatttttagtagagactggctttcaccatgttggccaggctggtctcaaactcctgacctcaggtgatttgcccgcctctgcctcccgaagtgctaggattacaggcctgagacactgcgcccagcctctgaagacccacttctactgcacacctgtcataggcagaaagcagccctgggctcctgctgccctctgagagagtcctggaaggtactctgtccttggcctttgggccacattccatggactcctggtaaagtctcacttctcccttcccttccaccaaaagaggaaagaaggagaatttaatggctgggcacagtggctcatgcctataatcccaacactttgggaggctaaggcaggaggatcacttgaggccagaagtttgagaccagcctgggaaacggtgagaccccatctgtccccctccccatctccccatcaatgaactttagtactttctcctgctaggctttccatattgatcatgtttttgactcttgctatttcaaccattcttcagccattaattcgcacaataacccccgtaaagtaggtactattatcatcatcaccagcatccctcctttttatagaggggtacgggctcagagaggttgacaaacttgacttaggacactcagagggatttgaagccctgcagcctggctctagagcccgcctcctaaacattgcccagatctagcctggcaccgtgcctcacacctgtaaccccagctctctgggaggccaaggcaggcagattgcttcagcccaggagttcgagaccagcctgggcaacacagtgagacttgtctctatttatttattttttatttatatatatatattttttgagatggagtctggctctgtcgcccaggctggagtgcagtagtgcaatcttggctcactgcaattttggcctcccaggttcaagcaattcttgtgcctcagcctcctgagtagctgggactacaggtgcgtgtcaccgtgcccaggtaatttttgtagttttagtagagacgggatttcgccatgttgatcaggctggtcttgaactcctgacctcaggtcgtctacccacctcggcctcctaaagtgctgggattacgggtgtgagccatcgcattcggccttgtctctatttaaataaataaataactgcccagctccacttccaatttatttcttccactgcaaccttgatgctcccttcaagtcttgccctggagaggaatctcacacaggggaagggctgctctgatgtgctggagagcagatggacagcggtagataatatggggccctggctcctgtggacagagaacacacttagcacaggactaacatttgcaggctctagggcagaaatacaaatgtcggctcccatgctctgagggtcaacattgaaaaactatacgtaaaacttttgaataagacagtctatcttccttcctttataaatgtacctttgtaaagatctggaagggcaggtcaaagatggaattctcaggctcctcagagctccacaccagaaagcagcagcaccgggtggctggcccaagaccagcaccctgctctctccacctcaggcttcaccctgcaccataaggctttgcatgtgtgcatggaagcccattcctgtccaaactccctgcaaacccctttctgacccaagtcacccttccagcatgggagtgctcacaagctgctgtgcagcccaccctctgaagaagtgacccaggcaagggtatccacaggccagggccctatgggttgggaattccagggccctgtccaactgcagtgtggtctcaaagggagtggcatgggttctagatgtgcacacccattcggctaacgggcaggagggagcagctggaggagggccaggacgaagccctctaaagcaagggcacggcaaaggtctgcaggcttgcccaggtctaaggcaggtctaaaaatcccacttgaagggatggaaaaaatataatttcccatcaagaagcatgaaaaatacacttctaggtcaggcgtggtgcctcacacctgtaattccagcactttgggaggcggaggcaggtggatcacctgagctcaggagttcaagaccagcctgaccaacatggtgaaaccccatctctactaaaagtacaaaagttagctgggtgtggtggcacatgcctgtaatcccagctatttgggaggctgaggcaggagaatcgcttgaacctgggaggcggagattgcagtgagccactgtaatcccagcactttgggaggccaaggtgggtggaacacttgagcccagaggtttgagaccaacctgggcaacacagagagacccaatccctacaaaaaaaaatttaaatatatacatttaaaaatttttaattaaaaaaatataaaataaggaaatagaggacataatatattacctacaacttatatcctaattaataaaggagatttcccattttgtatgagtagatttgtttttttgagatggagtctcgctctgttgcccagctggagtgcaatggtgcaatctcagctcactgcaacctctgcctcctgggttcaagcaattctcctgcctcagcctcccaaatagctgggattataggcacacagtaccacgcccggctaattttcatatttttagtagagatggggtttcaccatgttgatcaggctagtctcaaacgtgtagatttttataacatataaacatatatttaaacagaaataagccaggtgcagtggctcacgcctgtaatcccagcattttgggaggccaaggtgggcagatcacctgaggtcaggtcaagaccagcctggccaacatggtgaaaccatctctactaaaaatacaaaaattagctgagtgtggtagtgggcgcctgtagtcccagctacttgggaggctgaggcaggagaattgcttgaacctgggaggcggaggttgtagtaagccaaaatcgcgccactgtactgtacagcctgggcaacagagtgagattccatctcaaaaaaaaaaaaaaaaattaaagtgcctccattttaaaaaagataagaaacaacaatcagatacttctcaatgtttagctgttaacactcttctgcatctcagttgggctttaaaagcgagattgagacataagacttgttctttcccagcataaccagatgtgtccacgcccttctggatccaaataaaatgtaaagttatcttcctcaaggagcacaccatagacaatgtgtcttttcagaatgtctttccttacattagacagattggggttttttttgtttttgcgcggggggacagaatcttgctttgtcgcccaggctggagtgcagtggtgcgacctcagctcactgcaacctctacctcccaggttcaagtgattctcctgcctcagcctcccaagtagctgggattacaggcacccaccaccacacccggctaatttttgtatttttagtagagatggggtttcacaatgttggccagactggtctcgaactcctgacctcgggtgacccatcctgtcctcccaaagtgttgggattacaggcgtgagccaccatgcccaacctagacagattgttttataagggtttagaaagaaaggaaactacatgaatgagtacttagtctcctgctccttgaagtggatgaattgttttctttggtttccaacacagtctgttaagagttgtagcacgccccaagagtatgtgcatgtagtggagctgggatggggaggattcccaagggaatctttagctgtcacccatgaaccatgcagagtggagaaggacactcagcctttctgtggctctcacctgcatgattattctggtggctgcaaagggcgataggcagtaggaggagacaccccgtgacaccaagagctgtgtccagacatgatcgtcttggcacagcttgagggttttctacagaaactggtagagatgctagacagacacaagatgccagccagcctcctttgcgattggctcttagaggtggaaaatggtaaagtcatcaggctcattctccctaggactagaggaacatgttaattatattaaagtagattagtgggccgggtgtggtggctcacgcttgtaatcccagcactttgggaggccgaggcgggcggatcatgaggtcaggagatcaagaccatcctggctaacacggtgaaaccctgtctctactaagaatacaaaaaattagctgggcatggtggcgggcgcctgtagtcccagctgctcgggaggctgaggcaggaaaatggcgtgaacccaggaggtggagtttgcagtgagccgagatcgcaccactgcactccagcttgggcaacagtgtgagactccgtctcaaaaaaaaaaaaaaatgcagattagaacgattaaaatgattactggtgattactggtactattgctgcaatagtaaaaatacatctttttcaccaatgtctttgtttttttttaaaatgttccaccgtcttctgaccatcatggtttatttttatttttattttatttatttatttatttttttaagacacagtctcgctgtcacccaggctggagtgcagtggctcgatctcggctcactgcagcctctgcctcccaggttcaagcgattctcctgcctcagcctcctgagtagctgggactacaggcgcatgccaccacatctggctaatttttgtatttttgtagagacagggttttaccatgttggccaggatggtctcgatctcctgacctcatgatccgcctgcctcagccttccaaagtgctgggattacaggcatgagccaccgtgcccggcctcaccaatgtctttcactcatgtatctttctccatggacttcacttatttatatatggcatttcattcaacatgcaacaaacatttattaagcagctactgtgtgcctagtgctgggggtacagctgtgaataccatcaatatggggctagatgtggtggctcacacctgtaatcccggggctttttttttttttgagatggagtttcgctcttgttgcccaggctggagtgcaatggcaagatctcagctcaccgcaacctctgcctcccgggttcaaacgactctcctgcctcagcctcccaagtagctgggattgcagacgtgcgccaccacacccggctaattttgtatttttagtagagacggggtttctccatgttggtcaggtctcaaactcccaatctcaggtgatctgcctgcctcggtctcccaaatcactgggattaccggcgtgagccaccatgcccagccctatcccagtgctttaggaggcggaggtgggaggatcacttgaggccaggagtttgcctgggcaacatagtgagagctcatctctacaaaaaaattcaaaattagccaggtgtggtggcaggtgcctgtagtcctagctactcaggaggctgaggtgggaggattgctttagcctaggaggtcgaggttgcaatgagctatgattgtgccattgcactgcagcctgggtgacagagcaagaccctgcctcttaaaagaaaaaaaaaaaaaaaaaaaaagccctggccaggcgtggtggctcatgcctgtaatcccagcactttgggaggccaaggctggcggatcacaaggtcaggagttcaagatcagcctggccaatatggtgaaaccccgtgtctactaaaaatacaaaaatcagcggggcatggtggcgggcacctgtagtcccagtaacttggggggctgagtcaggaaaattgcttgaacctgggaggcagaggttgcagtgagctgtgacagcaccactgcactccagccctccagcctgggcgacagagcaagactctgtctttaaaaaaaaaaaaaaaaaagaaaagcccttgctgtatagaatcccttaggttatggatggggaggagggcaggggtttaggaggggagaagcggaaggaggaacaaaataaagaagagacaattagttggagagtgataaataccataatgatatcatggaactaggcttaccagatcaaacactgggcacccagttcaatgtgaatttcagataagcaatgcatgatttttaagtataaatatgtcctacacagtatttatactagaaaattataaatttttttctaaaatttacattgacctgggcagcctgcattttatttgctaaacctggcaaccctaatttgtgtgctgggtggtggtgagtgggcaatttcagataggcctcttttgtggaggtgacatttgagctggaacctaaatgtaaagaaggagccaatcattcaggaatctagaacatcccagcacagggaacagcaagtataaatgctctaaagtggaaataagcttggagcttagaggaacaggaagaaggtggggtggcggagctgagtgagggtgaggagaggagggaagcggaaggtgatgagggcaggcaggctggcaggggccagatcccatatggtttgtgggctgtaataagagtaccaaaacttacataccaggccaggcgcggtggctcacgcctggaatcccagcattttgggaggccaaggtgtgcggatcacttgaggccaggagttcgagacctgtctggccgtgtctccctctaaaatagaagctccaagaggggcaggaagttctcttccgtcttagaccctatgtgcacgaccttggatcgatcaacattgaacacctcctacgtgccaagccctgacatcaaaatgggtcagaagccagcagccgctcgctgaatctgtgttcctctttggaaaacgagaaccgtgaagcctgctggcatggtcagagccaaagagcattgtcacttgtgagatcagcgcagaaacagagcggggccccgattggcccttcgaacttgggtggggccagagcattcctggccccgccccctgcagcgggccgctcgctcatgcgctctggcctcaggctcgctgtcgcgccattttgccggggtttgaatgtgaggcggagcggcggcaggagcgggtagtgccagctacggtccgcggctggggttccctcctccgtttctgtatccccacgaggtgaggcgcggggcgtgcacggcctaccagagtggctcttggggcccagctgaggaagggatgaggcgctcccggtactaacgagcgctagggagtgagaaccgcgcctctgggcgagagcggaatgtgggcccggggttcgggtggtgcgctcaggcaaggtcttcggcttccctagggagcgcttgccgcgcctcgcggcatcctaggtctctggcccaggtgcggcgaccccagggcctgtgagggctgagggcaactgaggcgcggcctaacgcgagcctgcggattgcccgccctttcctctccatcacggcgctgattggctgcgccgccgcctctccgctcgggaaggccgctccttattggtcgcgctcgcatgtccattctctgcgacggtggctgctagccgcgcgagctgagtgtgcggcggcgaggcctgcccgggcggggactgcgggcgcgtggagctgcggctgcctcgcgtcgtcccttgccctaactctagtgaagcccccgaactcacccttctctaacctctgtacttgtatccctgactgtaaaacgggcatcgtgatctcactttgctgaattgtttgtgagaattctagtcggtacacccgggacatagaaatcccctgtaacgcgggttgggggagggttccctcgttttgggagaaacgctgtgctgtggtggttcggagcatagactttggaattagatcgcctgggttcattccagacgtagcctctcgttaggggtgtaacttgaggctggtcacctcatctcactgagcctccatttccttagctgcaaaatggggttaataacagaatctacctcggaaagtggctttgaggatgcgctgagttatttaccgtggtttacaaaggttccctgggagctgacggttgtttattcatctctcccacccatctttctccttagccagtgtggctttctgtttcttccatattccagggttattccgatttaaaattatttgcacatgccttttgtttgctggggaagtaccaacatttttgcaaggcaggccgcctctcccaagtttccctcaccttaggcctcccctaaccaacctcttcttttgttttctttttctttttcttttctcttttcttttttttttttttttttttttttttttgagagagagagtctcgctctgcctcccaggctggagtgcagtggcgcgatctcgactcactgcaacctccgcctcccggattcaagcgattctcctgcctcagcctcccgaatagctgagactacaggtctgagactacacgccaccacacccggctaatttttgtatttttattagagacggggtttcaccatgttgatcaggctgtctaatcaacctgtctaggacctttctcccatggctctccatcaacatcacctggttttagttacttcatagcatttactaacacttacttattgcttacttgttatctttctcaactgctagaatgtaagctgtttgagagcaaggaccttgtctgtcttgcttacttctctctccctggtgggtgccatcccacctgtgcttgccacatggtagatgcacaagtattattcttccttggaggcacagaaggggaccctttagtcttggattccaccaattgctctttttctcaccttgggcccacatagtcatatctttggcctttctctgtgtgtgtctctctcttttttttttttttttttgacatgctttcagaggatcctaatggacctcgtctctccgctcctacaaccctttatctttcacttcttaccatcagtgcaagggaagtctctctccccttctgattacttctgctggttggggtctgggacaggattggatggatgcaagagcagtgctctagttttggaattaatttgtttctttattcatttaataactttattgagcatccacttaatctctgggaatatagtgaaaaaacaaaaatggacaaggtcccttcccttgaggaccatgtattctcgtgggcgaaagaaaaaacattagataatttcagatagtgacagaattatgtgacaggtgaagaaggcttttctgaggaggtgacatttgggtagagaccagccattaaaaggtgaggggcagaacattccaggtagagggaatagaaggctcaaggctcaaggacaggaaccggcttggaatattgaaatatttaaggaatatcttaggttcctagagtgttacatgaagaagggagaaatatccaggacccggatcatagaaggctttgtaggcaatgtaaggagtttggatttgattctaagtggtatattcctatggttagaaagcagagggtaggttgaggtgttgggatatgttcttcatgtgtgggtgccagatagttttcattcattggatctctttccctcttcccaaatgtaaggcctcgggaatggttctctaatgtgttgaggacatatctaagaaaaaggcagacatcttggatcagcttatgtcacagatgtctgtgagatggctttggaaaacaaagcttttattccagaaatctccacctgtaattgagggcctgtgggaagatgctagacttaggtctggccattcattcaacaagaagaacttggaaatttagatgtctgccataactgatttattgtgatgcttttttaagtttcttaattgtgtattggtagagatttccaaagatagttacgtggagaaagaaaagtatcaccccctcatttaaaggtgataaaaatgaattcttatcttctccctcccttttttttttggagacaccatctcactgtgttgcctgggctgacctgggctcagtctatcctcctacctcagcctcccgagtagctaggactacaggcgtgcaccaccacactcaactaatttttattttttttttgtagagatggcaccatgttgcccaggttggtctcaaactcctggactcaaccaatctgcttaccttggccccccaaagagctgggattacaggcatgagccaccctacttggccaaaatgaatgttttgtttctagtttgagtcatttttagatcagtaacactttttgcatttatatattgctaatatttcagagtgtcaaagtacctttacttgtggttgcataagataattagagcttgatcttgttgataattatgaatacctgtaaaatgttctctaaaagtccctgatttctcttattttctcaaattaaggataagcttagaattcggttttatagactatatctgcaaggcgatataaaaaggatttgttgacaaatagttccttaaagaatattcccaaagaataaactttggaaggccaaggtgggcggatcacttgagctcaggagttccagaccagcctgggcaacactggaaccatgtctacagaaacaacacaaaaattagccaggtgtggtggtgtgtgcctgtagtcccagctacttgggaggttgaagtaggaggatggcttgagcccaggaggcagaggtttcagtgggccagaattacaccactgcatttctccagcctaggtaacagacccagaccctgtctcaaaaaagagtattaagattctgggatctatgtagtattttaactttgagggattataacatgcatatttatataacccctcacttttttttaaacttaaaaatagtcctaccctagcatctcaacttaatcattttaggtttcattctattatgtggttttatttatttatttttattttattttattttattttattttatttttggagacagggtttcactcagtcacccatactggactgcagtggcaagacctcagcttattgcagcctagacctcccgggctcaagcaatcctcctgcctcaacttccctagtagctaggaccacaggagggtatcaccaagcccagctaatttttttttttttttttttttttttttgagatgggagtttcacttttgttgcccaggctagagctagagtgcaatggtgcagtcttggctcattgaaacctctgcctcccgggttcaagcaattctcctgtctcagcctcctgagtagctgggattacaggcgcatgccaccacgcccggctaatttttttttttttgtatttttagtagagacggggtttcatcacattggtcaggctggtctcgaactcctgacctcagatgatccgcctgcttcggcctcccaaagtgctgggattacagacgtaagccaccgcgcccggcctgagcccagctaatttttaaaattttttgtagagacaggatctcactattgttgccaagtctggtcttgaacggtccttggggtcaagtgatcgtcccatctccacctcccaaagtgctgggattacagaagtgagccaccttgctcagcctgttgtggttttagaatctagaaggttgtgtccacctctttctgtttgacacagtcaaccaaccaaaataaagatgaagaataatatttttgatggaaacatcaaaggtatctagctttttaaaatagtacaacaaatatataacgggtgctcatcactattgtaaggctctagggagagagcagtgaacaaagcacaaagtccctactatcagtggagtttacaatctagtgaagagagaagcacagtaaatgacaaaagaaattaatatgcctgataaaatgtacttggaaaatagtagagtaagggcatggagagtaactgaggtgaatgctcttttagataggatggtgcagcaaggcatctctgaaaaaaagatgacatttgaaaagagtccttccaggccgggcacggtggctcatgcctgtaatcccagcactttgggaggctgaggcggcagatcacctgaggtcaagagtttgagattagcctggccaacacggtgaaaccgcatctttactgtatataaaactcagccgggcgtggtggcacgcacctgtagtcccagctacttgggaggttgaggcaggagaattgcttgaacctgggaggcggggactgcggtgagctgagatcacgccactgcactccagcctgggtgacagagcaaagacccctgtctccaaaaaaaacaagagtcctgaatgagaatgaagtgggcagtgcaaaccttgtagctttccgtgtgcagagctctgcaggcagaaggaatggtaagtacagaaccctgaaacaaaagtaaaatcactggcatgtttgaacaggtaatacaggataaattttatcttttttcagagacagagtcttactctgttgcccagattggaatgcaatggcatgatcatagctcactgcagccttaaaattctgagcttaaccagtccttctgcctcagcctccagagcagctgagactacaagtgctcgccaccatgcctggctaatttttatttattgtagagacagggtctcactatgttgcccacgctggtcttgaaatcctagcctcaagtgatccttccgcctcggccttccaaagcgctgggattacaggcatgagccattctgccaggccagaacaaatctaaaaattcactttcttgaagtacttttgaataaacaaatttaattgtggcagttaagttggtcatttgttcatctgacattcatgcaactgagttcccacattatgttggggctgctaatgattgatctgaagggatagtctccagtcttgactggaaactcatgttttgctgggtgactgacatgttgtgacttatcctttagttcatacaacaaatgcttactaaatatgtactgtgtgccaggtaatgctgaaggtcctgagcatacagacgaaagtccctgccctcaggagcttgcagtctagtgtgtgtatgagacgacaaagaagtttatttcaaatgagggtaattgctaacacagtaaaacaaggatgatgtagatggtaatcgtagaaggcctttttgaagagttgacagtgggctgagtgctgaatggtgtccattatcaaattagaggatgagcattattatggtcagggagaactcttgtggccagtttgtagaacagaaggcttttgtgcctggaatgtagcaagagccaggaggaggtaggagatgaggtcagtagataccagattgcttagaccctgctgtggtaagggatttggtggtggtggtggtggtggtggttgttttggagatagggtctcactcccattgcccagtctgtagtgcagtggcctgatcacaactcacagcagtctcaatttgctggatctacaggtgtgtgccaccacacctggctaattttttgtatatttagtagagacagggtcttgctgtgttagcccaggctggtctgaagccggctgaagcaatccacctgccttggcctcccaaaatgctgggctaacaggcggcagccactgcacctggccaggagtttgggtgtttaagacaagtaattatgaggaatctaaggagttttagttgagaaatatacaaatgctagagaaacataatgaagaaagtgaaatgcagatttattaagaagtgtatttttaaaaatcaagaaaataagccctgtgtggtggcatatgcctgtagtcccagctattccagaggctgaggcaggaggattgtttgagctcaggagttagaatccaatctggacaatacagtgagaccccctgtctctcttttttttttttttttttttttttaaagacaaaatagatctgtaaatctgcccctgcaccctccccacccaagtttctaacaatctgccttgcatgaatccccaaaggtagaataaatttgcatatggcaaagaaaggccaatttcctttaactcagatacactgatgttaatgatttaacttgaccacagcaaactaacttttttttttttttttttttttttttttgagactgcgtttctctcttgttgcccaggctggagtgcaatggcgcaatctcgcctcattgcaacctttgcctcccaggttcaagcaattctcctgcctcagcctcccaagtagctgggattacaggcatgtgctaccaggcatggctaatttttagtagagacggggtttcaccatgttggccaggctggtctcaaactcttgacctcaggtgatctgcccctctcagcctcccagagtgctgggattataggtgtgagccaccacacctggcccaaactttcatgatttcataactgatccaccatttcaatacagaaaaaaggaataggaaaataaatggattaaatcattgctttccaaagtgtgttctattgaaaaggagttctatagccaaataatgggagagactgggcaatcctcccaccttagcctcccaagtagctaggactacagggccacaccaccacgcccggctaattttttgtatttttagtagagatggggttttgccatgttgcccaggcaggtcttgaactcctgggctcaagcgatcgtctgcctcagcctcccaccagtggagactctggattaattgatgtgaaccagtaactttgtgagtttaaagtgctttgtattgtgaatctccaaagtggggcaggatataatgtgtagcattttccaaacttgtgatataaaaaaccataaagggtatagcctctcaatagattgtatgtgtggtttaatgggacttgattttcacacctatagagtggaacacctggattagagggagtgattaggtaggtggtgggatctactcagtcagaacattagcttcctgtgataaacacattttctaattaaggggaaggactgcagcatgtagaatacagataattctctttagaaggttggggtttctggctgttggggagtgccctgcataagcacagcattagataatattttcttattttctggctccccaccgctcagttgtcctctggctgccctcttttcacatcagcctttctattgtgttgtgagtgctttcactcttggtcagccgtctgtcatttccacctaagaggcagccttgggtaatagaaagagggtagacctacggagttggactgatttaaatctgatctttatttattaaccatatatagttaatatatgtcaacctgagtgcccttctttgtgtgtaaaatcattgtgtggaataaatgatatgaagcctatgaaaacatctagcatcgtgtgcctggttcatacatgtgacacttcccccattctgcaaaccattaccagcccaaaggtcctctactccactttcattacatttttacccacttaagaaaaccttcatgacttccccatacattaaatcatggcactcttcagccaagtatggaggaacctatatgatctggtcttgatctcctagcccactattctctcttcccatctctgttactttgctctcacaattcattttggcagatgcgccctcatcctactttgcctattcagatacacatatttttcaaggttcagctcaaggctcaggctctgggaaactcttggatggccacataaccccgtgactcccttcttaattttctaacgtttaaggtgctgtctttgtgattcatttggcacttcagaggacagatgtttcagaatttgggattttttttggatgcatgtactgtggattatacaacatccccagtggggcttggggtagcaccctgtaatcaaacgtattgatatttctttagtgaaacaaatttgcatactaagtgagataaatctatgttgatagcctcaggcagttcaggctggttttgctgccaagtgagtttgccacaaacttgttaaaaaacaaacttttaagtttttttatttttggatttcatcactttagtaaagggtatataggcctgtacttggcatttcagttgtgtcttgtcttctgaactattacagaagctccttctaggacaggaacttgattgcatattgtcataggcattttaaaaataaatgggtcccggtatggtgggtcatgcctgtaatcccagtgttttgggatgccgaggcaggaaaattgcttgaggtcaggagttcaagaccagcctgcgcaatatggtgaaaccccatctctacaaaaaatacaaaaattagccaggcatggttgattgcgcctgtagtcccagctactcaagaggctgaggtgggaggttggggcttgagccctggaggttgaggctgtggtgagctatgatcatgcccctgcagtccaacctgggccacagagcaagactctgtctgaaaaaataataaaattttttaaattccttactgtaaatgtataatagatatgtgattgtaagattagaaaagtatgaagagaataaaactctccttatatctatcaccgagatgttatcactgttctacattttggagtgtgttttttgttttcttctatatgtgaagttttttttcataatttgaattatgatatccttgaactttttccactgaccttttttacattttacaaaaattgtgtgtttagtttttttcttctttttcatagaagcctctggttaatttggtgcatgatttccctgaaagggctccactttcccatctacatgtggctatatatctaaaagctgcctaatggaatctaagcataagtggagttttctaaaatcgctttttttttttttggagacaaagtctcgctctttctgaggctggagtgcagtggcacaatcttggttcactgcagcttctgcctccaggttcaagcgattctcctgcctcagccacccaagtaactgggattacaggtgcatgccaccatgcccggctgattttgtatttttagtagagacgggattcaccatgctggccaggctggtctcaaactcctgacctcaggtgatccacccccctcagcctcccaaagtgctgggattacaggcgtgagcaaccgcgcccagcctaaaatagctttattgaagtacaatttacatactataagatttatccattttaagtgaactgtttgggaaatgttagtaaatttatgtagattatgcatgtgtcaccacagtccaattttagaacactctgtcacccccaaaaagttccctcagtttgcacctaattttatcgtctcaccaacaagttggagaccataaagctcaattgataagattcccaggatttgtgatctgttggtaatcatgcacatctgacacttgtactctgtgtatgtgctgtttctgtgtgttttttcattttccttttaattgagtgggttcagactcctttttttcccatttttaatggacaaaattgtatatatttgtggtatgcatgttttgaaatatgtatacattgtataatggctaaatcaagctaattaacatattacttcacatgctgtgtgtgtgtgtgtgtgtgtgtgtgtgtgtgtgtgtgtggtgaaagcacttaaaatatacccagtaattttcaagtgtacaatacattattatagtcaccttgttgtacaataaatctcttgaactgtgtatttcttagcctatgttgttagtagttaaatcgacgtaggccatttagttagcttaaaatttgtgggctgggcacggtggctcacgcctgtaatcctagcacactgggaggccaaggcaggaggatcacttgagtccaggagtttgagaccagcttgggcaacattgtgagaccctgtctctacaaaattttttttttaatttgtcatctgttagatgtgaagttttttggtcagttataagcatattatgtgatttagttttgtttaagctttaaatatgaaaacttctagaatcataatcttagctgtcatcttctgaactctagaatttatctccctagatgcaaattcttagcactttgtagtatttgcgattacatgttgtacatgaaggaatttcttgtttctttaatctcagaactttatgtgggatatttatttgctgtttaaaattttaatttctcgttgtggggccttttttttttttttttttaagacaggtcttgctccatcacccaagttggagtgcagtggcaccatctcagctcactgcaacctctgcccccaggctcaagacatcttcccacctcagccttccgagtagctgggactgaaggcacccactaccatgcctggctaattttttgggttggttggttggtttgttttgagacggagttttgctcttatcgcccaggctgcagtgctatggtgcgatctcagctcactgaaacctttgcctcccgggttcaagcgattctcctgcctcagcctcccaagtagctgagattacaggctcctgccaccatgtccagctaatttttgtatttttagtagagacgggattttaccatgttgaccaggctggtctcaaattcttgacctcaggtgatccgcctgcctcagcctcccaaagtgctgggattacaggcatgagccaccatgcccggcttcaatttttttgtagttttggtagagatggggtctcaccctgttgacaggctggtctcttaactcctgagctcaagcagtccacccacctcagcctcccaaagtgtcgggatttacaggcctgagccactgcccgggctccttatggggcttctttaataagttcctccagtgattttttttttcttaacctttattagccctttcccatagcattaaatcatataaacttcttggtgacttcgagcagtccttcagcttttttttctatgactatctttttgaaattttgggattttttttcatctcccttatcacaaaattgtctcactattgtttttgggggaaaaggcacatctcatttgctggactcttgtctcagagtcaggtttactgcccatataaaaaacaacagatggatgactttcagagagaataacccataatataaacggatttctttaaatgtaaatcactttttccgtaagtgaccagttatccaaaccttattttatattttagatcctatagcaatggaactcagcgatgcaaatctgcaaacactaacagaatatttaaagaaaacacttgatcctgatcctgccatccgacgtccaggtaaagaaaataaacgttttttggttgattaattccttcaggacaggtgagagaaacctatgtattatctgcctccttataaatatattttaaaaaattcatacttgggttctcaagcgtagtttataagtgttacagctgctataccatggtgtgttgtttcttttttgagtaaaatagcttttatttggcatcttctgggattaaaaagtactagttttcggataaaaagtactgacatgtttagaatgctttgtctttgaccttttccaaaatacccacttaaaacatgcctgctttaggccggatgcggtggctcacacctgtaatcccagcactttgggaggctgaggcaggcggatcacgaggtcaggagatggagaccatcctggctaacacggtgaaaccccgtctctactaaaagtacaaaaaattagccgggcgtggtggcgggtgcctgtggtcccagctactcaggaggctgagtcaggagaatggcgtgaaccccggaggcagagcttgcagtgagccgagattgcgccactgcactccagcctgggcgacagagcaagactccgtctcaaaaaaaaaaaaaagcctgctttagagataaaataattagggcatagaaaggagagtaattgcctaaaaagtgattaagtgaatgaagccaagtaatcagttactgtctcttaattttaattttctattgggtttgatttaactaatatattttaagacctagagctttttttttccttcctgaatctgaccagattccattaaaaacgtagaattaaaatattgaactcaggtgttcacaggactcagctgttaagttaaatgagggagataggccaagtggagactggtaatatcaggagaatacatgccctgattaagtggcaagtactttttggaactagctaattttggggattcagactagttttgcaagatcagatttccagttttgcttgaaaaataaggatatttatatgaagtgccctcatttttaaatgttagcaagtaacttcaaaagattttggggccgggtgcggtggctcacgcttgtaatcccagcactttgggaggccgaggtgggcagatcacgagggcaggagatcgagaccatcgtggctaatatggtgaaaccccttctctactaaaaaatacaaaaacttagctgggtgtggtggcacacacctgtagtcccagctgctcaagaggctgaggcaggagaattgcttgaacctgggaggtggaggttgcagtgagttgagattgcgccactgcactccagcctgggtgacagagcgagacgtagtcccaaaaaaaaaaatattttgaaacacagccagggttggtggtcacgcctttaatcccagtaatttgggaggccaaggcaggaagatcccttgagtccaggagttcgagaccagcctgggcaacaaagcaagaccctgtctctacaaaaaatttaaaaattagccaagtgtggtgatgtgtgcctgtattcctagcaactggggaggctgagacaaaagcttcacttatacccaagaggtcggagctgcagtgagttatgatcatgtcagtgcactctagcctgggtgacagagggaaatcttgtcttaaaaaaaaaaaaaaaaaggccaggtgcatttgctcacgcctgtaatcccagcattttgggaagccaaggcaggcggatcatgaggtcaagagatctagaccatcctggccaatgtggtgaaaccctgtctctactaaaaatacaaaaattagctgggcgtggtggtgcacggctgtagtcccagatacttgggaggctgaggcaggagaattgcttgaatccaggaagcggaggttgcagttaaccgaggccactgcactccagcctggtgacagagcaagactccgtctcaaaagaaaaaaaaaaattggacaggcacatttgctcacgcctgtaatcccagcactttgggaagcccaggagggcagatcacctgaggtcaggagtttgagaccagcctggccaacatggtgaaaccctgtctttactaaaaatacaaacattagccaggcatggtagcatgtgcctgtaaccccagctacttgggaggctgaggtgcaagaatcgcttgaacccaggaggtgaaggttccagtgagccaagattgcccaactgcactccagcctaggtgacagagtgagactttgtctcaaaaaaaaaaaaaattgaaatacagtgcaagccaaactacttctgggccagatatatcttgtgagcagtcagttattgatccttgatatgggccatattaaaatgctcttgacctgtttcttcaaaacttaccaatgtgcatgctcatagaggatgttggaagggttccatgaggaagagaatgtgtgttatatattatgtatgatgactagaatcatgaacatgttaatgcatctatcctcttctagaaaagtctttgtgatttttgagaggaaaaattagtttattagtgtataaagaagtaatgtgttcctggataaagggaagttaatggctctaatctttaatcttcttagactttcaaagaaagctgttgccaacactattaaaaattttttttttttttttttttttggagacggagtctccctctgtcgcccaggctagagtgcagtggcgccatcttggctcactgcaagctccgcctcccgggtccacgccattctcctgcctcagcctcctgagtagctgggactacaggcgcccgccaccatgcctacctaattatttgtatttttagtagagacagggtttcaccgtgttagccaggatggtctccatctcctgacctcgtgatccacccgcctcagcctcccaaagtgctgggattacaggcatgagccaccgtgcccggtggaaaaattattattattatttatttatttatttatttatttatttatttttgagacagagtctcactcttgcccaggctggagtgcagtggcgccatcttggctcactgcaagctccacctcccgggttcaccccattgttgtgcctcagcctcccgagtagctgggactacaggcgcccgccaccacacccggctaattttttgtatttttagtagagacgggtgtttcaccaggttagtcaggatggtctcgatttcctgaccttgtgatccactcgtctcggcctcccatagtgctgggattacaggtgtgagccaccgcacccggcaattattttttttttaataatgtgtgaggcaagagttctgttgctttatgtattcaggacagagtataaaaataatctggtatttctgggaagttaggaacatagcatttctcagggatcgagactgactgactagactgactcaactagaccttttgagactccttgagtgcgcagaaacatatgcatgtgaatattgtgataagttgaaagaaatgaacacagaaaggaacagactcaaactcacttcctggatattgattacaatttaggaaagagacttggcaatttatatgggcttttcctcaaatcatggatgtagtgtgttgccctgtacaaaatgctggctactaagtggaggaaacaaattgttctgtactcatataaaaccatagtatgtcccctcctgaaaaacatttttcagtttaacaatcttcatccttcaagaaagacatgataagcacaaagcaaggagagtttgaaaatatcagtgaaactcttgggactcagtcagaaagagggaaggtgttaaatgatacatgaaattaatttttcaaaaaatattggaatattgggtgttgccctatgaagccaaaggtagaaaaaaattaagagaaatactgtactgccatcacatgtgatcattaacctaggaaatttatcccagaatgtaatctgggttgaaaatctattggtaaattttttggataaattcattgctggtattaagaagtttttaggtttttttttagttcgacaagaaagcttagggctggtaaggtaaaataaggactgcactaaaactttcagtagtgaagcctagctgtgtgatcttgaacaagttacttaaccttagtgccttggttttttaaatgctatctacttttctgggtaatagtgacaactaaatgaaattttataattttacatatataatatatatgtaaatcgttggacccatttggctaataataatatattaggatgaattgactcatttgctcttcatcactagcctataaaagaaatattactactaatagtactaataatactcctttctgaaataagacctgggtatatgaagtcttgaagccacttaatctgcctgggaagcagcttctcttgcagatgagatgatcatccaattaggccactgtataggtttgtgagaatcatgtgagttaattgatggtaaagttatttgaaaactgaagcattatataagtttaatgtaacatatataatccacttaatagataagaaaagtgaggccctgtagacccacaaataacctaatcttttctctttttttgatttttttttatatatatatatttgatatatataaggtggaaagatttttatcttagtcttttaacatgaaaattcttttacagctgagaaatttcttgaatctgttgaaggaaatcagaattatccactgttgcttttgacattactggagaagtcccaggataatgttatcaaagtatgtgcttcagtaacattcaaaaactatattaaaaggaactggagaattgtaagtattttgtgaatacataatttaataccctgtatgtttataaggtttatataagcagtgttcttcaaagataaggcacgtgcttgtagtcccaactactctggaggctgaggcggaaggatcacttgagtccaggagttcaaggctgcagtgagctatgattgcaccactgtactctagccttttagtgacagaatgagaccttgtctcaaaaaaaaggattcagatatggatcaaagataaaattaaacaggacccttttccaaagcttctgttatttcatttgaatttatataaatttgtccagcttcatacctcgggttgctagggagtgagacttggtcttaatctccattatgtttggaatttatgctttactcaccgcctactgaagagacattgtgggaagacagtctgaataaatgaagtgatttctgatgttggaaaaataaagctgagaagaaatcagatacataaaacatttgcagaatgcaaaataatttagatttcaactttttgataaggtattttgccctatgtcttgtgggatatgtatatatatactaattttgagattaaacctattttataacaggtttaatgattagtaaattataaattaagaaacaggcattttttttccttagcttaggacagtgattctcaactgggggcagtttggctcaccaggggacatttggcagtatatttggagacatcatagctggaggattgctactggaatctagtgggtagaggccagagatgctgctaagcatcctacaatgcacaagatagctttccacaacaaagaattatctgagccaaaatgtcagattgagaaagcctggctcatgatagagaaaaagatgaggcttttctatagtgatagcagttatgatgttacaaagtattagcagttgacaaaaatcatcagtttatctaaaaagtcaactttaaactgctcaaaaacatcttagagtcttactttttttctcattccataaaagagagagtaaatattgttttaagcctgtatgatttctcaagtatcaccatgagtggtaaagaaatcttagaggccgggcttggtggcccatgcctgtaatttcagcactttgggaggctgaggtgggtggattgcttgagctcagcaattcaagaccagcttgggcaataaagtgagatcccatctttccaaaaaatacaaaaattagcgaggcatatggtggtgcacggcctgtagtcccagccattagggaggctgagatgaggggatcacttgtgcctgggaggcagaggttgcaatgaactgagatggtgccactgcacttcagcttgggcaacagtgccagacactgtcttttaaatctcagaatgtttaaaagtccatctctactggtagacatgccagccctctccctctattttgatttgtaaaactagtgagacttaacagaatctctttgggtgatataatctaggatgcattctaactagtaatggtcaagaaattttcacagagggctgggtatggtggctcacacctgtaatcccagcactttaggaggctcagatgggaggattgcttgaggccaggagttggagaccagcctggacaacaaagtgagacccctcttctctacaaaaaaatttaaaattagccaggtgtggtcgtgtgtggtgtgcatctgtggtccttgggaggctgcagtgggagggattgtcttgagtctgggaggtgaaggctgcagtgagccaaggttttgtgctaccctccagcctgggtgacagatggaaacccagtctcaaaaaaaaaaaaagaataaaaaaaattggaaagatttttgttctaaagtgagagttaaattgaagcttttgaggatgtgtatggattaagtagcatatatctgtaaagattttaattatgtgtcctgattagtttacatatgaaatgaaaaaaaaatttttttttttttttttttttttttttgagagggagtcttgctctgttgcccaggctggaatgcaatggtgcgatcttggctcattgcagcctctgcctctcaggtccaaatgattgtcctgcctcagcctcctgagtagttagtgttacaggtgcccaccaccatgttcagctaattttgtatttttagtagaaatggtttcaccatgttggccaggctggtctcaaactcctgaccttgagtgagccatcgcacctggcctaaaatggaaattttttttttttttttttttttttttgagacagagtcactcttgttgcccaggctggagtgcagcggcaccatctcggctccctgcaacctccacctcctgggttcaagcaattctcctgcttcagcctcccgagtaactgggattataggtgcctgccaccatgtccggctaatttttgtatgtttagtagagacatggtttcaccatgttggccaggctggtctcaaactcctgacctcaggtgatccacctgccttggcctctcaaagtgctgggattataggcgtgagccactgcgcccagtctaaaatggaaattcttaattggcatcaaggagtaagggaagttcactaatttgtatgtaaaatatttgcatttgggaggcaatgtacgtttttctgggaaaaggattcacgctgtcatcagattattgaaggaatctgtgacccattcatgtagagggaaactgaagaaagaccaaaccttcctctatttgttttcttagaaaattagtaaataaaaaaacagttatgttttacctaaaatcatgtggacatgaatgtggattttgtgttacttcctcagttactgctttgcttttaggttgaagatgaaccaaacaaaatttgtgaagccgatcgagtggccattaaagccaacatagtgcacttgatgcttagcagcccagagcaaattcagaagcaggtaatgtcgctccactttttagatgggctcctctgtaaagctctgatctaattaatcttttcctctcctagttaagtgatgcaattagcattattggcagagaagattttccacagaaatggcctgacttgctgacagaaatggtgaatcgctttcagagtggagatttccatgttattaatggagtcctccgtacagcacattcattatttaaaaggtattgatgcatagattcatgtttttaaaatactttctaaagttttatttgcttgtgtaaacagttgtgtttttgtgactgttgtcattcctttgaatctgatcatcttggaatgagagcagaagtttctgtattgcgtttgtttcttctcaactaggatgtttatttcatattgctctattacctgtgaaatacttagtcttgataaactgcttgatccctttaaaaagaaaactggctgggcatgatggctcacacctataatcctagcactttaggagggcaaagtgggcggatcacctgaggtcaggagtttgagaccagcctggccaacatggtaaaaccccgtctctactaaaaatacaaaaaaaactagccaggcatggtggtatgtgcctgtcatcccagctactcaggaggctgagacaggagaatcacttgagcctgggaggtggaggctgcagtgagccgagatcaaaccactgcactccagcctgggcgacagagcgagactccgtctcaaaaaaaaaaaaaaaaaaaaaaaaagaattccctttgaatttcggaatttcggaaacccatctattcatagatgtccaatcagcatctctccttgaagacctaaagtgagtaaataaaaaaaacttgtaaatttatctgttttaccttaattttctagataccgtcatgaatttaagtcaaacgagttatggactgaaattaagcttgttctggatgcctttgctttgcctttgactaatctttttaaggtatggaatgcatcttggtgatatttttaaattaatattttaaattgcttgaatgtttgtatacatgttaagagaatgctttgaaagcttatttgatagataatgtttagagcatttcttttgaaaaatttcaaacctacacagaaatagagatgctatagtgaactcccatctattattacacaaatttaatggttagcaacgttttattttctctgttccctttcttaggaatgttataaaagcaaatcccaagcatcatatcatttcacccaagtattttaaagtatgtgtctctaaaggaagaaatacatatttttatttgactatgtttggagtttaattaattatatatttatacattattttacagtttacaggatactttcctgaatgtgttcttggtgtttgtgaaaatcctataagatttaaagaaatatatatatactttttttcttttttcttttttaaagacagggtctcactctcattgcccaggctggagtgcagtggggcatgattatagctcactgcagcctcaactacccaagctcaggtgattctcccacctcagcattccaagtagctgggactacaggtgcacactaccatgcctggctgctttttctctttttttttccctctctctttttttttttttttttttttttttgagatggagtttcgctcttgctcactgcaacctccgcctcccgggttcaagcaattctccgagtacactgggattacagcctgtgccactgggcctggccagtaaaacctgttaatcgcatttagaataataaagaattggaaacaacctaaataccaagtggcagatgaattgtttaataagagcatataaagatagttttgtgtaatatatttttatatatgcacagattgggaagacgtagttcagaatattaacactggactttttagtgccattatgaacagttcaaaaatacatactttaacctattttccacaatctcttaagtgactgtattatttaaaagccaaggctgggcatggtggctcacgcctgtaatcccagcactttgagaggccgaggcgggcggatcacgaggtcaggagatcgagaccaccatggctaacgtggtgaaaccccgtctctactaaaaatacaaaaaacaaaaacaaaattagccgggcgtggtggcaggcacctatagtcccagctacttgggaggctgaggcaggagaatggtgtgaacccaggaggtggagcttgcagcgagccgagattgtgccactgcgctccagcctggacgacagagcaagactccgtctcaaaaaaataaataagtaaaatatgaatagtctcagcttagtgcaaggctgtttcactaagatcagcatgctgggtttatgatgcactaaaaccatgttgctaaattcctttccaaggccactattgaactctgcagtacccatgcaaatgatgcctctgccctgaggattctgttttcttccctgatcctgatctcaaaattgttctatagtttaaactttcaggtaagttcatttgatttcttgcttttggttcttactctttgattttaaatagagttttctttctgtttgataaagacttctttgccagcattgatttttctgaaagaaaaggttttttctgactctatttatctatagtgttctgttctacagtagttctttcagatgctaatgagatgtttcatggaaaaaagcagtattctcttatatctagtaggttagcaaaaccccacatcctaactcactcttggagagtcaccctgtacactgttttactggtggcattaagaagctagatttctgaggccttcctctttcgttcatttatatgggtattaacatttggggaatcatgttttggttaggggttgctgtccagcttatacaaaatgacttttattggaagccatatgagggagacaaaagacttgaagtaccagactttgaaaggggtaggaactagtagtatttcagaggaaacatagccacagggctatagcagggaatgcctagttaccctgttgctactgagatagtggcctccaatcattctttctgttcttaatcattaattcaagattcaggaccaagaaaggggtgttaattggtacaaactgttgctatactgcgatgcaaggagggcctagcccattcattgtttgtagccagtacctggacttaccttcacaacatgaataaactcatagtggtagggaaagcattccccaaaaggaaattgggttgttttagctagaataggagatgaacagcccaaaaggacatgtcccacatcagtgttcagctggatagcagtttgagaagttcttacttaaatgagtactactatttttgcttacaccttttgaattctgagaagtcaggtttaatgaagctcttgagaacttgtctggcagggagaccaaggaaagaggcataatctaccctcaggggacttgtaccctcattaagaaggcagtactatgccacaagaaatcagtaactaaaagacaattagtttatctgccttggtggtcatcttacaataaacgtagttcagaaaagaaaggggatgtattagtatgcactgagcttgagctttgtaaggaaagtcttcatatagtcttagctgaaccttgaaggaagatttagattaggatgagaactagaggtggcatcatttatagcatacaaacagaggcagaagtcagaatgctttatgcagctgccagatgtagctggagcagagaattcttgtcagaataggtaatgctcaggctgtgaagcctgtgtataaaatgttttgtccacgtggtaagggaacttataaaagtggtgttcttaatattttaatcaaaagtttcaagtcagtgtttattctgtaggatctccctgaattttttgaagataatatggaaacttggatgaataattttcatactctcttaacattggataataagcttttacaaactgatgtaagtatttaaaatgttgcctgagtggtctttttctttcattaagagttatttggctacagtctggaaacctatttactcttgcattgttaaaagataaaatttcaatactgtaataatatttgattctatttgatgttacatgtttggtgtgtgtagtatacagaattactcttatcatgggcttggcttaagccatagtgtacatataaggctgtttcattacattattgaaagtaggtctttaaagtagtgacattatggatatttcatgaaataaaattatttttcattgaagatactaagaaaacttaaaactctataatggtagcccctttttaaaaatcatctggctaggcatggtggttcacacctgtaatcccagcactttgggcggccaaggtggggaggatcccttgagcccaggagttcaagaccagccttggcaatgtaaggagacccccatcactacaaaaaataaaaataaaattagccagatgtgttggctcatgctaatggtcacagctactcagaaggcttagttgtgaggatcccttgaccttgagcccaggagggcaaggctgcaatgagctgtgaccatgccactgcactccagcctgggagacagagggagacctcgtctcagaaaaagaaaaaattatccacagctcgagaaagagagaaaatggtaaaagattgtaatttgtaaatatttctgatatgggttttatattgtgtacttttaaacatataacacttattctgtgctactcatttgttaatatatttatgaccttctttccgaagagacaaaagacaaaatattaaaaatatttcaataccaaataaactaaaaattagaattggtgattcaaatcaggttttaagagtggggtacagaaagaaattgttactatcgttgtacaacagattttgtctcagagtttgactatattaataggaactttaaaagatgtagctctcataaaataattatttcagtccaatgggagggaaaaacactccttcagaaaacaaaacttttcttcacacaaaagtcacaaggaaattttttggatagaattcttacaaggacctttttgcccagttaaccatgtgctaccttgtgctactatttatgccttaagtaatcagtgtgagggagttttggttttggctttggtttttgttcttactctgatgtcttcccttgtctcactctgtcaccaaggctggagtgcagtggcatgatcatgacttactgcagcttcgacctccctgggctcaagtgatcctcccacctcagcctcccaagtagcagggactatgggtatgcaccaccatgcccagctgattttttttattttgggggcttgctgtgttgcccaggctagactcaaaactcctgggcttggcccgtcgcagtggcccacgcctataatcccagcactttgggaggccgaggccatcctggctaacacggtgaaaccccgtctctactaaaaaaaaaaaatacaaaaattagccgggcgtgatggcgggtgcctgtagtcccagctacttgggaggctgaggcaggagaatgacgtgaacccaggaggcggagcttgcagtgagctgagatcgcgccactgcactccagcctgggcaacagagggagactgcgtctcaaaaaaaaaaaaaaaaaaccactcctggcctcaggccatcctccagcctcagcctcccagagggttgggattaccggcgtgagccactacactcagccagaatatactgtttgaatctaatacggaaatattttgtaattcagcaacttatttgaaagacttggtgaaaagattggtggtggcatagctgtagtttacaataactgatttgatttggatttaattgataaagagtctagttcaggaatttcagttactcctcttacttatgttagcattagagttgtatgttggagtttttgttttcttttatgtgaggatgaagaggaagccggcttattggagctcttaaaatcccagatttgtgataatgccgcactctatgcacaaaagtacgatgaagaattccagcgatacctgcctcgttttgttacagccatctggaatttactagttacaacgggtcaagaggttaaatatgatttggtaagatgatggtggagacaaataattaaaagacattctctccctatctcctccaagaaataagctgttgagttttgcttttaaaaatattcttgtttttgtgttttgttccagttggtaagtaatgcaattcaatttctggcttcagtttgtgagagacctcattataagaatctatttgaggaccagaacacgctgacaagtatctgtgaaaaggttattgtgcctaacatggaatttagaggtaattatggcaaaagtatattagtataaatctactaagtctgtgtttgttttttgtaacatattcagtctaattcatttattactggataaaacttgtatgtcatttatttcttattttctaaaccaagacagaaaatgtagtatctgtaatgagttttgttgtgccctgtgagggttttctcatggaaatattaaataagacttcaaaaattcctttacactaagaagataaactatctggaatttctatttagagaaagaatttgattttgtttcatttattatttcaatgaatttttagctggctttatttatttatatatttatttgagacaggggtctcgctctgtcacccaggctggagtgcagtgatgcaatcttggctcactgcaaccttagcctcccaggctcaagtgatcctcctacctcagtcttctgagtagctgggaccacaggcacacatcaccatgcctggctaatttcttgtatttttggtagagacagggtttcaccatgttgttcagggtagtctcaaactcttgagctcaagcagtccacccgctttagcctcccaaagtgctgggattgcatttctgagccacctcgcccagaaatagctgtttttaaacaatcgacttgagaatagaaatgataactttataaatacaaggttgaagcccacttagtttgtgcttaaggttaaactatagtgctaagagcctatatttataaaatgtatgtccttgttctaacagttgtgaagaacaagtaatgaaggtgggagggattgtgttttttgttttggggacagggtctcactgtgtcacccaggctggagtgcagtagcacagttatggcttactgcaacctcaacttcccaggctcaagtcattgtcccaccctggcctcctgagtagctgggactacagacgtgcaccaccatgctcagctagttttttattttttataaagatgggggtcttcctatgttgcacaggctggtctcaaactcctagcttcaaacaatccttctgcctcagcctctcaaagtgctgggattacaggcatgagccaccatgccaggccaagattttgttttatatcaaaatagttattagatcagtggttttcaaattacatctggaacaaaataaggaaattaaggacaatatagcgtgagattttatttcctgttgtgttttcataaaaatatgtttaaaggataaatcttctggctgggtgtggtggcccatacctttaatcccaacactttgggaggctgaggtgggaggaacacttgagcccaggagttaaagaccagcctggccaaaatggcaaaaccttatctctacaataaataaattagttgggtatggtggcatgggcctgtggtcccaggtactcaagcagcttaggtgggagttttgcttgagctcaggaggtggaggctgcagtgagacatgatcatacaactgcagtgtgtgtgtgtgtgtgtgtgtgtgtgtgtgtgtgtgtgtgtagacttttttttttttttaatttatatgataaaaatagagatgagatctcgctgtgttgaccaggctggtctcaaactcctgggctcaagcgatcctcccatttcagcctcccaaagtgctaggttacacgcgtgagccaccatgccggccatttctgacattgtccactctacttatttgttgttgaaatgactttaatgaaataatagtgattaaaattaggttgttggtattttaatgttcttatttggtgaaattaaaagttagcattctgatactgatccctaacatttttgacagttgcaggtataatccaattctggggaaactgtcacattagaacaagtgagcctatctcatagttgtgtgaattacctaatacctcacctttcagggtagcatttgctgctctagataatgattaagagtatatgaagtagtcatctgatgggaacgaattctttgctgtagaacaaggcagttttacatactcttctgcattctcagctgtaaagtacagtgacgtcttttggagtgttatctgaaatatcatctctccttgtagctgctgatgaagaagcatttgaagataattctgaggagtacataaggagagatttggaaggatctggtgtgtatcttggttttttagttactagtctcttagcaagccagttttaaggtggttctctttctagtaaatgggagaagtgggattgagaataagagtgttttttcagcgggctttcattgagaactgttgtctttcttcaacttgtcttaaaaagctcttatatgacctgaatgaaaatatcaaaagttgaatcatttgtctgttcttacatagtatttatcaaaattctgtgattctgtgacctctttagtttcattttgattttgtatttcttgggggcgggaatgtttttttcattgtttgtgttgctgatagctattgggtggccctttgtttttcgttcttttttttccgttttacaatcgtagccaaattattccaggcaatttgttttcttataaattggatcagcttgttggtggttgttttttttccccataatatattttcttttcatttcatagatattgatactagacgcagggctgcttgtgatctggtacgaggattatgcaagttttttgagggacctgtgacaggaatcttctctggttatgttaattccatgctgcaggaatacgcaaaaaatccatctgtcaactggaaacacaaagatgcagccatctacctagtgacatctttggcatcaaaagcccaaacacagaaggtaaatatttttaatgtggttttgtttctaaaacagacatcagtgacacccacacaagtcaaaaagaaataacgtctctgataatagagcttactctgccagataacctattctgattaagatttatataatctctgaagatggctttatgttgatgtattgagcacttaagtttcttatagaccagaaaattgatagatggccacacttgttaccttagctgagacccgctgtatcaaatatgcttaacttaaacttagctgttctttaattgaggaaagtttctttattgtctattagtatagtcttattttacatttttatatttttgagatggagtctcactttgtcaccaggctggagtgcaatggcgtgatctcagctcactgcaacctccacctcccgagttcgagcgactctcctgcctcagcgtcccaagtaactgggattacaagtgtgcactaccacacctggctaatttttgtatttttagtagagacaaggtttcaccatattggtcaggatggtctcaaattcctgacctcgtgtgatcctcacacctcagcctcccagagtgctgggatacaggtgtgagtcaccgtgcctagacagtatagtcttattttatattttatacataagcaggttgtgttttgttgttgttgttttgttttgttttgttttgagacggagtttcgctcttgttgcccaggctggagtgcaatggcacgatcttggctcaccgcaacctccgtttgccgggttcaagtgattctcctgcctcagcctcccgagtagctgggattacaggcatgcgccaccaccctggctaattttgtatttgtagtagagatggggtttctccatgttggtcaggctgttcttgaactcctgacctcaggtgatccacctgccttggcctcccaaagtgctgggattacaagcatgagccaccatgcctagcctaagcagttcatgttttgaagtgtccctctctctctttttttttttttttttttttttttttgagacgttgtcttgctctgtcatccaggctggaatgcaatggcaacatctcagattactgcaacctctgcctcccgggttcaagcaattctcatgcctcagcctcccgagtagctagaattacaggtgcatgcaactacacctggctaattttttgtgtttttagtagagacggggttttgccatgttggccaggctagtcttgaactcctgacttcaagtgatctacccgcctcggcctcccaaagtgctgggattacagccgtgagctcctgtacacagccagtacagtctcattttatacataagcaatttgtattttgaagtgttcatctccattttaacatggttttctaaaattgcctgaatttctaatgtgatagatatatacaggtattttgttattttactatgttatgaatttgcttttcagcatggaattacacaagcaaatgaacttgtaaacctaactgagttctttgtgaatcacatcctccctgatttaaaatcagctaatggtgagttgtgaaattcttgctttttttacagcttgccacactatacctgaattcaaaaaacagcttcctatccttgttcccttttgttctttttttttttttttttttcttttgagatggtgtcttactctgttacccaggctggagtgcagtggcacagtctctgctcactgcaactcctgcctcctgggttcaagcgattctcctgcctcagcttcccaagcagctgggactacaggcacgtaccaccatgcccggctaatttttgtatttttagtagagacggggtttccccatgttggccaggctggtctcaaactcctgacctcaggtgatccacctgcgtcggcctgccaaagtgctgggattgcaggcgtgagcctccatgccctgcctattatttcttttattgaataaaatctcaaatggtttccccagatcttgtccatgtgaaattaattattgataaagaaaatattgcttgattaggaggaaaataggaataaatacaactaaactgtaactcagctttgctacctagtgtataaataaggattatacattggcttccttttcttttttatttgaaagacgaattcttaaaaattggagtacatttcaaagtactagaaaattgataaatattaaggatatcttttggccgggtgcggtggctcacacctgtaatcccagcactttgggagactgaggcgggaggatcgtgaggtcaagagattgagaccagcctggtcaaaatggtgaaaccccgtctctactaagaatacaaaaactagccgggcgtggtggcgtgtgcctgtaatcccagctatttgggaggctgaggcaggagaatcgcttgaatccaggaggcaggggttgcagtgagccgagatcgtgccactgcactctagcctgggatacagagcgagactctgtctcaaaaaaaaaaattaaggatagtttctgatgtttatgaatgtattgatctagatccagatatattcctttttaaaaaaaatattttaatgtaggaaatttatgtacacccaaaggtgaagagaatattgtaatgagctcccatgtgaccatcatttagcttcaagaattattaacatttggtgatctattcctttcattaatttatttccctacccactagaataatgtaaagcaaattccagctagagagacatgtttctaattcagaatagcttcacttctgggaatgtaggtagacatgctcaccgatgcatggtccagctcatttttactcaattatgtaatatgtgttccttagtcatgaaacaggcatggggaaaaataaaatcatttataatcctaccaaaattaatgactaaatagtaaatcataatataattaactgtgctttaattacttgacattttatctttttttataactctgatgatgtcactaatttggaagtaatgatccttaccacttaagtaactgtggctttctgtttttttatatagtgaatgaatttcctgtccttaaagctgacggtatcaaatatattatgatttttagaaatcaagtaagtagctttttatttgttacacgccacttaatctctttaagagttttattatgtaccaccttctcatctactgtgcagtcattttatatccacatctaacaaaattaacaatgatttctttataacttagaattttagaccatgcttaattttcctcagatgtctttttgcaataatagtaatagaattgggatctagataatgtccacacattgcttacagttgattgtgtcttaagtctcttaatttacaatagagaggtccttctctgccactttttgtttgagatggagtctcattctgtcacccaagctggagtgcagtggcaccatcttggctcactgcaacctctacctcctgggttcacgtgattctcctgtctcagcctcccaaatagctaggattacaggcacctgccaccacacctagctaattttttgtattttcagtagatccggggtttccccatgttgaccaggctggtctcaaactcctgacctcaggtgatctgttcacctcggcctcccaaagtgctgggactacaggtgtgagccactgcacccaactgccttcctttccttttatttatttatttaaaaaaaatttttttttatttttttgagacggatctcactctgtcacccaggctggaatgcagtggcctgatctcagatcactgtaacctctgccttccgggttcaagtgattctcctgcctcggcctccctagtagctgggattacaggcatctgccaccacgcctggctgattttttgtatttttagtagtgatggggtttccccatgttggccaagctggtctcaaactcctgacctcaggtgatccaccagccttggcctcccaaagtgctgggattacagctgtgagccactgcacctggcctctaccctttcttatgcttgttgttggagaaaacactcatttatcttagagactttctcacattttacttttggctgattgcaccttgaatctctcagtattcaaggggtattggttccaggacgcctgaatatcccaaaattgatgaatacttaggtcccacatttgggcctgcggaatcctcatatatgaaaagccagccttccacatacagattttacatcccaggaatactgtgttttctatttgcatttggtctaaaacaaatccagccaggcatggtggcttgtgcctgtaatcccaacactttgagaggctgaggcaggcagatcatttgaggtcaggagttcaagaccaccttggccaacatgacgaaaccccatctctactaaaaatactagctgggtgtggtggcacatgcctataatcccatctactcgggaggctgagacatgagaatcacttgaacccaggaggcgaaggttgcagtgagccaagatcatgccattgcactccagcctggacaacagagcaagactcaaacccgtgttgttcaagggtctcctgaagtttatgttgtccctctagtccccatatttctatattggtaaatctgggggcttgattagacttagattccttggtcgggggtgacacaagaaagcatcataggtatactttctgtttcattttatcaggatatacacaatatctggttgttttgtttttttttattttttttgtttttttttttttgctcactgcaagctcagcctcctgggttcacgccattctcctgcctcagcgtcccaagtagctgggactacaggcgtcaggcaccatgcctggccctggttatcaatttttaatgatgttaagacagatcagtggattcagatgaaggagaacgttacattgtcaacattttttaaatagcattttaaaaattgagatatactttattcttttttttggagacggagtttcgctctcgttgcccaggcaatggaacgatctcggctcaccgcaacatgcgtctcccgagttcaagcgattttcttgcctcagcctcctgagtagctgggattacaagcatccaccaccacgcctggctaattttgtatttttagtagagacggggtttctccatgttggtcaggctggtctcgaaccccctacctcaggcgatccgcctgcctcggcctcccaaaatgctaggattacaggcatgagccaccgcgcccggccttattcatttatttttgagacaaagtcttacagtctgttggccagtctagagtgaactactacaatcatagctcaatgcagccttaaacttgtaggctcaagtgacccttttgcctaagcctccctgagtagccaagactataggtgtgtgccacaccacctggctaattttttatactttttacttagtttattgtttctttctttctccttcttttttttttttgagaggtagttttgctctgttgcccaggctggagtacagtggtgtgatctcggctcactgcagcctccacctcccaggttcaagtgattctcttgcctcagcctcctgagtagctgggattacacgtgcctgccaccatacccagctaatttttgtcttgttagaagagacagggtttcaccatgttggccagactggtctcaaactcctgacctcaggtgatccacccctgcctcggtctccgaaagtgctgggattataggcgtgagctaccacgcccggcccatttctttattttttgaaacagggtctcgttctgtcgcccaggctggagtgcagtgacatgaccacagctcactgcagccttgaactcctgggctcaagcagtcctcccactttcagcctcccgagtagctggaacccaggcacgtgccaccacacccagccatattgcattacttttaaaaaatcaattgagaaaaattatagagaatacctgcttccccagttagagtatgttggaattttgccaatcttaaatggtatctcattgcagttttaatttacgtttgttttattttgagttcagttaagcatctttccacttgaagggtccattttcatttcttttcggtgaactgtgaattcatcttcttttgcccatttttctatctgattattggtcttaatttttagagaacgtgtagtttttcttctgattctgaatgcctaggtcactttaattgtactgagaaaaaaatcaaaacttgcactcatcttatttctttgatgtctttgcccagtaacaatggtgccatcttgcaaaatattttaaacacacaagcaggaataaaacaatatgatgattactgaaataatcctcacaaatcttaaaactccaggccatatttatgtatacatacatatacaatggaggtattccaggtgctccctgcccagtcagtccctttctctctataggtaattactgtagtgaattcggtgtatttgacacccatggaagtgcttttcttacgctttcactacgcatttatgtttctgcaaaaattatttagtattatgtaggttttaattttttttttttagatggagtcttgctctgttgcccaggttcaagccatgctttttttatactttcactatgtgtttatgtttctgcagaaattatttagtatgctgtaggttttaatttttttttagatggagtcttgctctgttacccaggttcaagccattctcctgcctcagcctcccaagtagctgggactgcaggtgcccaccaccacgcccagcaattttttggtagagacagggttttgccatcttggccaggctggtcttgaactcctgacctcaggtgatccacccgccttggcctcccaaagtgctgggattacagtcgtgattcaccacgcctggcctaggttttaaatttttgtttgtataaatgacatcatactatgggtttcatttttctgttttttgttacttgtttgttttgagacggagtcttcgctctgtcgctcagtgcagtaacacaatcaagtcatgcagtggcacgatcttggctcactgcaagcttcacctcctgggttcatgccattctcctgcctcagcctcgcgatagctgggactacaggctaccgccaccatgcccggctaattttttttgtattttttagtagagacggggtttcactgtgttagccaggatggtctcgatctcctgacgttgtgatccgcccgccttggcctcccaaagtgctgggattacaggcatgagccaccgtgcctggccttttctgttttattttgagaatgaggtcttgctctgttgcccaggctggagtgcagtggtgcgatcatagcttacttcagccaggaaattctggactcaagcgatcctcctgccttagcctccctagttgatgggattacgggcatgctccaccgtacccacctacatcatgactgtttgtccttaacatctttttttttttcttttttcttttttttttctgagatggagtcttgctctgttgcccacgctggagtgcagtggtgcagtctcagctcactgcaacctccgcctcctgggttgaagccattcttctgcctcagcctcccgagtagctgggactacaggcgcatgccaccacgtctggctaattttttgtatttttagtagaggtttcaccatgttagccaggatggtcttgatctcatgacctcgtgatctacccacctcggcctcccaaagtgctgggattacaggcgtgagccgccactgcgcccggcctaacatcatttttgagttattcatttagtgcctaaagcgatccagctacctcagcctctcaagttgctgggactacaggaattcactaccatgcccagctaattttttatttaattttttcttaatagagatgaggtctcactatgttgcccaggctggtcttgagctcctgggcttaagcaattgttctaccttggcttcctgaagtattgggattatagacaggaatgaaccaccacacccaggaggcttttctagtttagactaatgaatgtttcaaatttagaggtttttaatgaagattgttctcgtatttgttgctttttgggggtgggaagagaacaaaaaatgagacacaaaaaggttaaataactttttcaagaaatatctgctagtgatgattcttaagtttggtgaaatcttagtctccttctctgtgatattattattttatggtatgttgatttatctgcaagatgttatcctcatagttttgtgctctgaaaaggagaatttagaaagtggaaattgaaccattatgtgcaagtgaaagttttggtttctgggcagcagcatctcctattataacagagcttaaaaatagcaaattgttctttaaatcaacaggtccttctcttccaattgtcttttactcaaatatggaatcattgcatttagagcatgtatattattgtgttttttaggtgccaaaagaacatcttttagtctcgattcctctcttgattaatcatcttcaagctgaaagtattgttgttcatacttacgcagctcatgctcttgaacggctctttactatgcgagggcctaacaatgccactctgtgagtattttattctaaagttttttagcctggggtaggggctgtactgtgctggtcaaagatatctgaatgttttcataatttcactagtgggaaaacaaatgtctgctttctattcctttatactctgtttcattctaaaagcatttgaggctgcttactaaaataggtgcattatgacaatacaatttaataaactggagccaaggaaagtaactgagataaagttaataaacagaaatgtgtgtcaaaggatcctatatagtagtccaagaaactccaaattttatttggagtctcttagcagccagggcaaagagggaaacttgggaagttaaaattttcacagggtctatgagataaaagttaaagcagagaatactgtacaatagtagtagtagtgttctcagcaacaatcatgtaacagttattttcatgtggctatttgcgtaaggtcacttatttctgagatatgacctaaccgaatgaaagtaattcactggggaccaagaaaataggtcttctggcctgaaccaggatgaaatgtagaggaatggatggtctgcatgtctttcaggccactattcaacagtattatttcttgaaatgagctttgggtaagagatggaaaacagttctaggttctttccttcatcaagaacttgaagtacagatactctcagtggccaattaagggtagaaaggacatcctttgaggtgagtcaagccagtacctatcttcaggcccagaatttatgcagaaaacagttctgaatcttggctccacctccaaaaacaaaataaatgacagagtcccctgagattctgagttctttctcagtggtaatagatataaaccagggacaactgtttcaacttcagatgttgttgggtttagctggctttttggttcagttgtgtttggttctcgatgtgccttcttaggagcctaacatgagcacatgtaaaaaaattattttcctaaactgtctatcaattgtcagtggtgggagatggctcagttttatgctgagaagggtgacatagtggttgccaagggtaatctgcagtgacaagctcaagagttggtagtgactgaaagctgttttttcatctatagctttacagctgcagaaatcgcaccgtttgttgagattctgctaacaaaccttttcaaagctctcacacttcctggctcttcagaaaatgaatatattatgaaaggtaggctgtttccctggtgtgcagactacaggtatccaatctcagattgtaagggtgagcactctgagttatacttcaggttatacagtctatgaaccagataatgtttaccaagtagtaagttagtttagatatttcaaaatgaaaaacattatcttgtttactactaacaataatttttttttttttttttttttttttttgagatggagccttgctctgttgcccaggctgaagtgcagtggcttgatctcagctcactgccacctctccctcctgggttcaagcgattctcctgcctcagcctcccgagtaactgggattacaggtgcactccaccatgcccggttaatttttgtatttttagtagagacagggttttgccatattggccaggctggtctcaaactcctgacctcaaatatctgcccgcctcagcctcccaaagtgctgggattagaggccactgcacctggccaacagtaatcttaatttgatatggaacttctcattacagaaaatgtagcaaagcccttttttccttccctagattgagtttctttaaggcaaagaagagatcatgcaacgtttattaactgcatgctcacctaggtaggggtgaaatgtgggtgcctgtggtagactctgcacaaatcgtgtcttcttacgtactgccaaggacacaggcagctgtatccatccacaggctggtgtatccatccaccaggcactacattagttgagtgtcctggtgccagctctgaatttagagatagtctcagtgtttttcactgttgcatcccaaaagcctagcacattgggttgtaggaagcacttttcagagaaactccctgatcttttcagtctggatcagaaatcctagagtggatgtgtgtatctgggtgtatgtttccaacactatccttcccccaacaatgatgtataattgtgtaattattgttgtttaatgtcctttttttttttttttttttttttgagatggagtttcactcttgttgcccaggctggagtgcaatggcacaatctcagctcactgcagcctcactctcctgggttcaagcgattcgcctgcctcagcctcccgagtagctaggattacaggcgtgtgctaccatgcccagctaattttgtatttttagtagagacagggtttctgcatgttggtcaggctggtcttgaactcccgacctcaggtgatccacccgcctcagcctcccaaagtgctgggattacaggtgtgagccactgcgcccagccttaatgtccatttctatgagagcggctaactagtctgtaatcttcattactgtgtttttagggtatgtaagaatacacagtatgtaataccttctctgtacggttgtatgagtgaatgaaataattctgcgccagcctagtggaggagcaccaatttatcctctagcccttttaacccaggtcagggaaggattttctctaggaagtgatctctaagctgagatatgacctaaccgaacgttaggtgtgagggataggtagcaatctgttgaagggtggatgagtctttgactccagtagaggaggaaacatgatgtgcagagttcaggaggcaagagcagatagctttctgtcctttatgcttggcatgtatttggggctctgcttagtaaacatttattttagaaatgttatttgtggaaagagagcttttatacatttttagctgacaaatttatttttctcccatgcttcctatttttaacccatttatggtcttttgagcaatatttttgcaatttggactctgtggctttacatgtatttttagaatttttttaggctcctaatctctttttttgagggaggtggataggcagttttctcttcagtttcctgtagtttgtgatcatgtttcctttaggctagggctaaacattttctgatgctggtttctttttctttttcttttttttttttttttttgagagagagagggagtctcgctctgtctcccaggctggagtgcagtggcatgatcttggctcactgcaacctccacttcccaggttcaagcgattctcaagcctcagcctcccgagtagctgggactacagacgtgcaccacatacctggctaattttgctatttttaatggagatgggttttgccatgttagccaggttggtctcagactctagcctcaagtgatccgccagcctcggcctcccaaagtgctggggttacaggtgtgagccaccaagcatggcctctgctactgatttctaagagaaagagaccccaaacagttctctctcagactcacctgctccattcatgtcagctcactgtttcttcctcttagtcaacctctttaattattttttaaaccttgagccttctagaaatactcagtatttcccagctaaattttgttgccaacccgtcctaattttaaaaggaagggaaatttagattatttttaaatgtagagagctatctcggggttgtctaagcatcttaaaatttagttgatgaattagtgcgcttttttccccccagtcgctctcttattctgaagtttaactaaactctatttgtttttgctgtttttgtattttacagctatcatgagaagtttttctctcctacaagaagccataatcccctacatccctactctcatcactcagcttacacagaagctattagctgttagtaaggtaatagagccaattttgaaagtggggttccttttttatttgctccaaactgtttgggcctcagaactctttggcattacgtgaagctttagagaaggtctgtgaattcttcctgaccagccactaatggacttttctgaaagtgtgggcatgctgttagattggagacgtaatagcagtcacctttaagtgtgtgctagaagcttgaatacattttcattctcattacaaaagtaacatgtttattgtagaaaaagaaagtgcagatgatccaaaattaccttaaatggagttaagtaggctttgcactaaatggatataaaagaggctgtctggacttctatgaaatgatgattaaaatcctttgtgttgtcttttcttccttactcttatttctcaaaaggaaagttcactctgatcaaaattttacagatacttagattcatgtttattaacactaaattttagaaaataaatccgtttaaggctgacagaattcctttttagatgctattcttgatcttatgagaattagatcaattcataggaagtgttggagggattttggagaacagagtgattattattcaactgagttagggctaagggtctttggactacttagggccttgagggatggagcggggagggaacccaagtctccgcctcccatatgtattaccatctcatgttctgattgagttagatttgtatgctagtagccttccaagaacttgtttaaagaaaaatggggttttgttgcttaaaaagaacataaaaaactactcatttgggggattatcagtaagtagacatagacattgaggcccacagaagttaaggctagtggcattactaggacttagtatttcttctctgcgagggcacgtgggcttaagacaagttacagctctgggatctgaggtttgtataagcaactctgtaactctgaagtatttttttcatggtggactttgggccatttaaaaaaaaattcaaatgaacaagcactagggtataattggtgtttttttcttaattttgatttttaaaaaataagatggcctctattttaaatgtgttttataaaggttaggtgtggattattagcataattaggttttttttttttaatttcagaacccaagcaaacctcactttaatcactacatgtttgaagcaatatgtttatccataagaataacttgcaaagctaaccctgctgctgttgtaaattttgaggaggctttgtttttggtgtttactgaaatcttacaaaatgatgtgcaaggtaagttaacggaaattattttctttgtaatggaataaaattaacatggctataaaatgcagcccacctaagcgatgtgggccttttgtgtcagtcattccttctgaagctcacagctctgtttttacttttatcaacagaatttattccatacgtctttcaagtgatgtctttgcttctggaaacacacaaaaatgacatcccgtcttcctatatggccttatttcctcatctccttcagccagtgctttgggaaagaacaggaaatattcctgctctagtgaggcttcttcaagcattcttagaacgcggttcaaacacaatagcaagtgctgcagctgacaaaattgtgcgtcaggttttgatataactgtaattttataaagtagcttggagaaactggggatggcagatgtttgaaatttttttatttaaaataaatttaaggctgggggcagtggctcaagcccaccactttgggagcctctagtgggaggatcccttgagccgaggagtttaagaccagcctaggcaacgtggtgagatctatctctacaaaggaaaaaaaagctttttaattagttggacacagtggagcatgcctgtggtcccatctacttgggaggctaaggtgagagggtcgcttgagcccaggagtttaaggctgcagtgagccatgatctcaccattgcactccatcctgggcaacagagctagaccctgtctcttaaaaaaaataataataataataacggaaataattagtagaaaatgttatggtatgttttatcagaattctgtatcctttagttatttatatccatgatggaaaattttaaaaacagagccaaacaggttgattttaagaacttaactttggtcgggcgtggtggctcacacctgtaatctcagcactttgggaggccgaggtgggcagatcacctgaggtcaggagttcaagaccagcctggccaacatggcgaaaccccgtctctactaaaaataaaaattaggtgggtgtggtggcacgtgcctgtaatcccagctactcagaaggctgaggcaggagaatcgcttgaacctgggaagcagaggttgcagtgagccaagatcgccccattgcactctagcctgggcaacaagagtgaaactccgtctcaaagaaaaaaaaaattactttaatggctacgcgggaggaattgttccccatatgtttcagaaataattaaagagaaaaggatagattattacagtatgaactctgttttaagacatatatcatgtttaacttttcgaataattattcctgttaaccattttctgttggatctcatttcttaacagcctgggttactaggtgtctttcagaagctgattgcatccaaagcaaatgaccaccaaggtttttatcttctaaacagtataatagagcacatgcctccgtgagtatgactagaactttgtgcatttatttagaaattttgttaggtgctcagaaaagtcctaaatttatattgttgattttttttaattctttagtgaatcagttgaccaatataggaaacaaatcttcattctgctattccagagacttcagaattccaaaacaaccaagtttatcaagagtaagtaaaatcatctggatgttctacagaagtaatgaaagaaggtagctaaaacccttagactttatggttgcagatacattttttatccgttttaaactttatgcaaaaaatacttggccacgtgtggaggttcatgcctgtaatcgcagcactttgggtggccaagggaggccgatcgcttgagctcaggagttcaagaccagcctgggcaacatggcgaaaccctgtccctacgaaaagtacaacaaaattagccaggcatggtggcatgtgcctgtagtcgcagctgcttgggaggctgaagtaggagcatcacctaagtcccagaggttgaggctgcagtgagccaagattacacccactgcactccatcctaggtgacagagtgagaccctgtctcaaaaaaaaaaaagaaaatattgtaagggcctggtgcagtggctctcatctgtaatcccagcactttgggaggtgaaagtgggagtattccttgagtccaggagttaacgaccagcctgggcaacatggtaagaccctgtctctacaaaacagccaagcatggtggtgtgtgcctgtagccccagctactcaggaggctgaggtgggaggatcacttgaccctgggaagttaaggctgcgtgagctgtgatcacgctcctgcacccagcctaggtgatagagtgaaaccttctcacaagaaaaaagaaaatattttaagatgtttgtgttctccaaacattaagttagtgttagtcatattgtgttccagaggttggtttatggttggataccaaaacattttttcagtagagagaatattataaggaaatataaatcaaagagagacagcatgtaaaggtctatgacagaaagacaagttttctatttactagaaggcaggtattgatgccacagcctttggatgttaatgattaagcataggtttattttgcagacttatcagttaccagtttagtgcgtgagttctctatgctgatattctgcatcttctttcaacaggttttttagtctttattaatttgtattgcataaaatatggggcactagcactacaagaaatatttgatggtatacaaccaaagtaagtttgtttttattattttttaaaggaagaaaatgttttgactttttttttagtacaaatcagtatctctgtcttatagatgatgatgtggttcttggtatggagatagtgtctatggttttcaaaatattcttaggtattgggagtaaagaaaaagtaatcctggcccagcatggtggctcacgcccgtaatcccacactctgagaggctgaggagggcggatttagctcaggagtttgagaccagcctgggcaatatagtgagactccatctcaaaaaaagaaaaaacaccctggaatcattgttctaatcctctagattagaggaccatctactctacacactggcattctccacagccagtgttctatattatgttaaatggtcagtgttgtctccaggagcctgccttattaaaactaacagcagaaaacaccacatgttctcactcataggtgggaattgaacaatgagaacacttggacacagggcggggaacatcacactctggggcctgtcgtgggatggggggcaggggaagggagggcagagggagggatagcattagcagaaatacctaatgtaaatgacgagttaatgggtgcagtaaaccaacttggcacatgtatacatatgtaacaaacctgcacgttgtgcacatgtaccctagaacttaaagtataattaaaaaaaaaaaccagaattttccttcccccttttttaaaaaatcgtgctaatccatatcgttccaattttagtatatgtgctgctaatgcaaacacagcagaatttttcaaatgagaaatacttaggaccaataaattaactttgtttttgacttatctggtatatatgcaaagaatgtatttaggtggcatttcccattagtagggaataaaacaattataacgataagataaagaacaactcttagggaaaatttcttcggggacagttagatccctgtacctcagttatgtctcaaaaattctacattgactaaaaaatgaattactctggaaaggagaccagaaaacatggcttccggcagtaggggattttgaggaaatctcatgcactgctagtgggagcctgaattagcctgatctttctagagagcaaaatgtatgcactttttatccagagcattagaattgccataccctttgagccatatttccacttcaaagaattggttctattaacgcataaactgaggattttgcatcatttagaattacggaaaacttcacttctagcatgtttgcaacaacatagaatgattggccgaattattttaaatagccattagcatttatgtacctgcaggtatgtaagcaaagacagttgggaagcttataacccaaaaatgttaaaactagttgtttctgggtggtgggatgattccttttttccctccttgctcctctctcttttttttttttttttcttttttttttttgagactggccaggtgtaatttttaaagaaaaaagcagagagggccaggaatggtggctcacgcctgtaatcctagcactttgggaggctgaggcaggtggatcacctgaggtcaggagttcgagatcagcctggccaacacaatgaaaccccatctctactaaaaatacaaaaatttgccgggcgtggtggtgggcacctgtaatcccacctactcagggggctgaggcaggcaaattgcttgaacccaggaggtggaggttgtagtgagctgagatcacaccgttccactccagcctgggcaacaagagcgaaactccgtctcaaaaaaaaaaagaaaagaaaaagattatggcatttggctacagggtagaggtgtgatggggtttttttatgttttgactttcagtctcttcagatgatcaaaaacagcagtcttgttatttagtaatttatcatattcataagaagtaactaacatctaagcattttactatttcattatagtgataatctaatattaagttgatttattttgctttaatagaatgtttggaatggttttggaaaaaattattattcctgaaattcagaaggtatctggaaatgtagagaaaaagatctgtgcggttggcataaccaaattactaacagaatgtcccccaatgatggacactgagtataccaaactgtggtaagtacttcattttaatatttttgtaagttacagcttccttcccatatgactgcaaaattaacaaagcttattctcttgggggccaagagaatcttggtctgatctcagcttctccacaatcagatccaagacatgatttctggatccttctgggcttagaatgatcttgtttcctgcttctttttcagggggattcatggacccctttaagagtctgatctaggtgatctctaagacaattttatgacagaagcccaactaaactgacttatctttaaggggaagaactgaataagccaagaaaagaaccatcttaatttcaaaggtccccttttattcttgagactatgagtctgtaattttgtgtctctgagcaattgctggttttaagtcttccgagtattttcttgacctttttatctcttgctttcttccaatccaggactccattattacagtctttgattggtctttttgagttacccgaagatgataccattcctgatgaggaacattttattgacatagaagatacaccaggatatcagactgccttctcacagttggcatttgctgggaaaaaagagcatgatcctgtaggtcaaatggtgaataaccccaaaattcacctggcacagtcacttcacaagttgtctaccgcctgtccaggaagggtaagtgtgttgtcaaagaactctgtgataaatggagactttaatgggagggcaaaaggatagtagtagttctggtgtctgttttcattggtgggcgtaataaaactaaatctcattgagttacagcaagcttattttctttaattaaaaacactgagccctttttttcttgtattatgtactacaaatatattttaagtgaatggatttaggagtgagaacaaaggaggaaaaatcccttcaatagaaatgtaataaggctgtatagttgcattttgtcagcactttataataagagtttatttcccagatcgaagtaatccatctattattaaaatgtggtagcatttttttatttttatttttatttatttatttttttagacagggtctcactcttatccaggctggaatgcagtagtacgattatggctcactgcagcctcaacctcccaggttcaagtgatcctactgcctgtcagccttccaagtagctaggacccactatgcccagctaattttttatttttttgtggagacagggtctccctatgttgttcaggttggtctcaacctcctgggctcaagccatcctcctccctcagcctcccaaagtgctgggattacaagtgtgagcctggacacagttatttttttttaattgcagcatactcagaaattaatagatcatggcataaacctaataatgactgtatagttgcattttgtcagcacttattatagagttcttacatgttacctgataaaatatatatttttcaagccagacacagtggtttatgcctgtagttctagtgctttgggaggccagggctgcagtgagctattacagtgccactgcaatccagcctgggcaacagagcgaggtcccgtttcttaaaaaacatatatgtgtgtggcgtgtgtatatatatgtatatatattttttcattgtattattacggagactttcaaacatatatagaaagagcataatgaagcctgcatgtgcccagcttcaataattaccaatatcttgccagttttgtttcgtttctccttttattctctgtattgagcaagtcttagacatcatacgtttcacgcgtaagtaccttattctacatcattaaccagtaaggactttttaattaaccacaataccactatcacacctaataatagtaattccttatggatcttttctttagacctatttttgaaggcataaaagcagttgagtttctggagaatttttggatggtgattaatgacttgactggctgctcttcccagagctgtggcagctctcccgtagaagatggggtttgtattggcgcaccaagatctccaacagccagtgtgtgtttcccatctcttgtaggttccatcaatggtgagcaccagcctgaatgcagaagcgctccagtatctccaagggtaccttcaggcagccagtgtgacactgctttaaactgcatttttctaatgggctaaacccagatggtttcctaggaaatcacaggcttctgagcacagctgcattaaaacaaaggaagttctccttttgaacttgtcacgaattccatcttgtaaaggatattaaatgttgctttaacctgaaccttgagcaaattagttggtttgtgtgatcatacagttatgtgggtggcttctagtttgcaacttcaagggacaagtattaatagttcagtgtatggcgttggtttgtgttgagcgtttgcacggtttggataatcttaaattttgacggacactgtggagactttctgttactaaatccttttgttttgaagctgttgctatttgtatttctcttgtcctttatattttttgtctgtttatttacgcttttattggaaatgtgaataagtaaagaattacttgtgttacttgccaagcagtgcacatttcatagtttcaaatctgtaatcagcaataaaaatcctaaaatatgtacctaagaacatcttaagggcaggttttcagtgctctctcatgcttttataaaaatgaagaatttctttaaatttcttccttttcctttcctggactctgtaaaatcctaatttctaaatcatgtaaactcagattatttagtctttttttttatatgggggaaggggacattaatatagatttggggcttatttactagaattttctgtagcagttcctaggtggcagtgtgagttttgggtaggtggctcctctgggagaaatgctctgcctcgcttaatgggatggcggtcgagagtacttgagactgtggatgttttgatctctttcatctctgctgttccctggagagtggaggttacttggaacttttcaaaccctgacaccttagaaccgtgaagtccagtccagtggtggatccggccggatgcctggtgagcttggttgcactggctccctcccttggcctggcccatggaattgtacagcattcgtttctgaggaatgaagaatcagaatatctaaattttgtgaggcacagtttatgctggaattgttcattgtccattcagtgtagttaaactggaacttttgtcttcccagctcaagtgatttgtcacaggagttatcgatatcccttttttttttcttttttacccccaagataagagtcttgttctgttgaccaggctggagtgcagtggcacaatctcagttcactgcaacctccacttcctgggtttgagcaattctcctgcctcagcctctcgagtagctgggattacaggcgtccgccaccacgcccagctaatttttgtatttttattagagatggggtttcaccatatttgtcaggctggtctcgaactcctgacctcatgatctgcctgcctcggcctcccaaagtgctgggattacacgcgtgagccactgtgcctggtgataacttttttaatcttaggcacttgactcgaatggtttttcttattttgaatttttttttttttttttttttttttttttgagacggagtctcactcttgcccaggctggagtgcagtggcacaatctcagctgactgcaacctccgcctcccaggttcaagcgattctcctgcctcagcctcctgagtagctgggatacaggcatgcatcaccatgcctggctattttttgtatttttagtagagacagggtttcaccatgttggccaggctggtttcaaactcctgaccttgtgatccgcctgcctcggcttaccaaagtgctgggattagaggcttgagccactgtgcccagccacttgtttctgtaatgttgcatgagaaatttcaagttctcttaagtctatttgtaccatctagtcatttaagggctttttgttgttgttgttgttgttgttgttgttgttgttgttgttggttttgacacagtaatgggaatactacattttacgttattactttggcttaagtggtcgttggtagaaagatactgaaatattactgaagccatttttaagccacaatttatttggaaagtctgggacaacagggaattgctagtgatggtttctgtatgtttttcactcacatgagctccttaagtatttatttggctttgctcttcctgaagctgcttgtgaacagtcagtcagataccgttctggaggctgcttgattcaacatcttaaactcagatcgagttcgaaacgttttccttcttcagttcaaaaggctgagtagtagatggtgtgccttttaaaatagttactgaacagcaagactagtacatttacttactttagcacagttcattaattatcaaataatttttttaaatgccttctattgaagttgcttattcaatcgtccaagacagtttttatatctggctttaaagattttaggacatggtggacagaaactgctggagtggtttttttcttttttcttcacaagccttactgactgtagctcagtggtgatgcacactgtgggtatgaagatcagggtttgagttacagcactgctactgactatgaccttgagcaaatgagttgacctctatgccttttttttctcttctgaaaaatgagcatattatttaccttcaaggtggttgtaagaataaaatgagatgatgcatgtagagtactcaagcagagaacctgtgcagagtaagcacacatcaggaaaagctgctgggggagcagagggcttgggtgggaggaagcgtttgttactgagcacacttaccaatgtgctgcatacctggaaggcgggaaggctttgtggagaagagtcctggcatgggcggccccacctgtaccccagggtgtttttacagaagggaagtattgccaggtttctcatcagagcttcctgctaggtgcattcattctccatggtattcaatcatgtcttttaacaagctgatttttaaataattgagtttttaaattatttttatgtatttatttttttgagatggagtcttgctcagcccaggctgaagtgcagaggcgtgatctcggctcactgcaacctccacctcctggtttcaagtgattccccagcctcagcctcccgagtagctggaattacaggcacgcgccaccacgcccagctaacttttgtatttttagtagagacagggtttcaccatgttttgtcaggctggtctcaaactcctgacctcaagtgatccacctgcctcggcctcccaaagtgctgggagtacaggtgtgagccaccacatctggccaccgactttttattttaaatgtattttctttgtgggaaacttggaaaataaagaaaaaatatttaaaaattaaaaataattcatattcctacctacattaagcattttggttcatttgagatcattctgtatatagttttgtaatttttttaaaccatatttacttggtaaacattcagtggatatatgtgatttatcattaggatatatcattaccagattatgtaattgtagtcattgctggatgtcttggaggttttctgattttgtagacaactcttgagatgaacatctttatgcatcaatttttagttcctgaaggtggaattagagccaattttcttgtgcaaagttcatgtcagtttctttaacacacctttacctacactgggcattatttggttgccattttgataagtaaaaatggtacttttccttacttctgaggcataatcagattggcatttaatcaaactattacatacatgtggtagaattcattttttttaaatttaactttgttgttgttgagagggagtcttgctctgccgcccaggctggagtacagtggtgcaatctcagctcactgcaacctctgcctcctggtttcaagcaattctcctgcctcagcctcctgagtagctgggattacaggcaccttccaccatgcttggctaatttttgtatttttagtagagacagtttcaccatgttggccacgttggtatagtggtgagcatagctgctttccaatttactttatttatttatttatttatttatttatttatttatttatttatttgagacggagtctaactctcctacccaggctgtagtgcattggcacgatctcagctcactgcaacctccatctcccaggttcaagcaattctcctgtctcagcctcccaagtagctgggactacaggtgcacaccaccatgccgagctaattttttgtattttttagtagagacgggggtttcaccatgttggccaggctggtctcgaactcctggcctcaagtgaactgcctacctgggtctcacaaagtgctgggattactggcttgagctaccacacatggcctcaactcttcattattaaattggttttgtgttaggtgattttgcccagctgtaggtgaatgtaagcgttctgagcatgtttgaagtaggctagactgagctaggatggtgggtcggttaagtgtattaaaatgcattttaacttatgatattttcagtttatggtgagtttatcaggatgtgaccccatcgtaagttgaggagcatctgtaatagcattttgttttttaaaaatatttaatcatctttgtcaatgtctcttgaatcctcagcgttgacaacgaagatgtgtccctaccctctgcctctcaggcttgctaattgctgggttctgctttcactttcacattgttgaaggagatatttccagttgttttctgtgcattatctgtagttcccttttaaaaggtgaagctgataaacacttgttatgacagtgtgaactgggcttaatgctgtgtcaagcagtgtgcaaagattacatttccctctcctcatgtcttgacttctgcatccctcaagagagaatgaatgttcgtaaggttaaggtcaaatggaatggagtttgctcctcatatttcatcagttgctcaaaggtactccccattttagcttgtgttctgtttggatcctgactttctcatggtggtttttctggacttttattagctttctttttcatcctgggtattacatggcgtgccttccactctgcccctggatttctttttacagccctggctcttgtgggccacaacagttcttgaggtaggctgctagggttccccattggagcctctccattccagtgttccagggggcagatgagctcctatccccactggcctgtcttgctggtgttcagggccctggcttccactttgcgaggtcacctttcaggattcatgtgtatccactttgctgtgtcagaaactccctactgctgacctccctctcctctttgctgtcattaatggattctcattgtgggagataaacgtgtgctcagcctagaataccacatgattttttttttcttgattcattgcttttgcctgttagccttgttgttctaaagtagttcatttttctactctacttttcctttcccctcaatgacccccaccccaaaactgtgcctaaatactattcatgcagtctttgagaatcaaacaggttcacactcttattcctgagtacagaaacttaccgaatcacacagctggataaagccgggattgaaaccctggcagtctggtttccagagcattctggcttagccacttatgccatggtttggcaaaagttagaaacagctaatcagctaataagggcatgatcacaaggcattttgctaataagtttttaaaatatacactatgggtgttttttggttgtgacaattcttgggtccctattcataggagcatcccccgcaccaatccctaggcacaatcctgtatccagcctgctggacatgaccgtttattccatttcgtaaaccctaagcatttgctctgcaaacctcctcctgcttggtccttgctcttactccttgtctgagaaacatggtggctgagctttgtgactgcaaggcagggctcatccttagggtctaccctgaggtattcttagtaggactgctctttgatagggcaaaggagtttcatggaccctttgaaaataatttagaggcattttcctttggtttctctgaatgagctaagaacccctgataataaggaactgctgtgggctgatggtcagttcctccagcccctccattctaggaaggtgtctggtaaagcagctcactgtgtggttggggaagggagacaaactatgaagttgtgccgatttctgggttttttcccttacacatgggatggtgtgagataaaaatctggcaacatagacgcagtgttcatgtcaagaaagagccacaataggtaagtcccaagactgttttctcagacctcatggaaaaggagacctcttggagaagtgagaagcaaaacgagaacaggtttattcaccttggactggaaagataacgccttgtaagcagttagaggcaacgcttttggatccagaggggaaaaggatcgctgctcccagcaacctgtgcttctgcagcaaatagcagagaagacagatcccgagtccctcttaagtgggtccagcagggcacggggaggagaagcttggcactcgccaggtcctccccatccaagacagaggaagtcttggtgtcctggaaaggccaggcaacccctgccacaggtttgatgtccaggtggaggcagccccacacaaagagcctcctctgccatgtttatcgatctcaggcgggaaccagggaagacgtctctaaagtggtgcctgcacagcatcctggccagtcaggaggaagcagcaacctaagccaactgccacaggttggcccttccaaaccccagccatgggaacacctggccctccccactgtgcttaggaactgagtgcttaggaaactaaaggatggatttggccacgggatgggccagaggtgctccagagccagctgaggcacatcaggccaaagtcaccctgcacttcccctgaggcagcagttcccaccaggattcacaagatttggagtgctgtcagaggaaccgcagtcatttatggctgtatattttgtactagaaaaaagtcactaggaattcatgggtgatattgcttaggacagtggttcttaaagtaccgtcaacatcacttagcacctaagtgcttagtagaaactacttcatcaaaaactctgggaatgagacccagcaaccttttaacaacccatccaggtgatgggatgcatgttcaatttggtgagccatgacttaggataaagctaagtaaaagtaagtaagacatagacggtagcaaaaattgtgaagatcaggtttgagaacagtggtctaaagcttcatgaccacaaaaattggaagggaccacattttaaagatgtgaaattaacagctttacttttgtgcaagaggtggcagaaaaaagatgagctgtggtaattagggcccatggggctgagcatcatcaccccgggagctatgggcctcgctgggccaaaaataatgtggcccctgggctgcagaagttctgagcatttccagttttcttagctgaagtttgattcagccttgaacggtgtttacattgtacttgttcataaatccaaggaaccaggaaagaaacttactaagactcagaattttcaggcacacattacaaagttgccagcacattttcagccacccaccaggtgcacatacactctgcgtacagaacagacaccagtcagaggtttgcacagcaaaagggccaagcgacttccaaactacagagaatctcaggccatctgccttgggaggtcttttggcagccataacaaatagactcaaaaaggcaactactacaaagaacagagtctgaagaagtgacgcacaggatgctgacagacccttagtagagatccttattccaaaggggcatcagctgcctgctaatccatccagggtcaggaggagattcctagtgaggccgctactgcagtctaaggagtgggaacaatcactagccagactggagcagcccagctctgaagaggaggggctgtcacctgatcctgcctgtgccccatcaagctctggagaccaagcaaaatcaaagctccaggcacacctcaaagctcgcttgacaactgaaagagccattgtgtgtgcactgtaggtaaggtcgtggtagagctgcctgggaaagggtggaagacacactaagatttatgattggatacagggcttgtgggcaacttccaaatttttcataatctacttttaaattaaaaaaccatcttaggccaggcatggtgacccatgcctcccagcactctgggagccaaaagtgggaggattgcttgacctcaagtttgagaccagcctgggtacacagtgagaccacatctctacaaaaaaaatttttgtaattagctgggcataatggcacatacctgtagtcccagctattcagtaggctgaggcaggaagatcagcctgagcctgggaagtcaaggctgcagtcagccatgatcacactggtctgagcctgggtgacagggggaccctgtctccaaaaaaccccaaacaaaaaataattttaaaaattactggctgggcatggtggctcacacctataatcccgcactttgggaggccaaggcaggtgggttacctgaggccaggagttcgagaccagtctggccaacatggtgcaaccctgtctctactaaaaatacaaaatgagcctggtgtgagggcacgcacctgtaatcacagctactcaggatgaggcaagagaatcacttgaacctgggaggtggaggttgtagtgagctgagattgtgccattgcactccagcctgggggacaagactgaaactcggtctcaaaaagcaaaacaaaattgctactatacatagactgctttactgttgtcattgcagacctgatgtttgtaggtttcagtgaatgtaaaagaatgtgtggatgaacggttttgttgttgtttttgagacagagtttcgctcttgtcacccaggctggagtgccatggtgcagtctcggttcgctgcaacctcagcctccccagtagctgggattacaggtgcccaccaccacgcccggctaatttttagtagagacggggttccatcatgttggccaggctggtggtcttgaactcctgactgcagctgagccactttacccggccagatgaatgcattttttaaatattaaacttaggttagaagcacataataaagctgtacacatctcctacagttttcactaatgaaaattgggatgccatttaaattacaaagaagtctgaggagaatgtcctacagactagtttcacatgcacatgctgtccttacatgctttgtatacagacattaaacacatcagtacagtacacaaagtaacaagttccacgaactcagcaccacaggaaaggtttacaaaaaatccaagaagatggctatgctgcccattaacaaactcccacctcctatctttgagttagccattgcttcttaaaacaatgtatctctttaaaagccctatttaagaacattggccaactcctccactcttccctctgctaatcctgctctgattaagtgcttgacaaatccagtatttattgatttggaatttcaagtaagttttttgtttttaagagcacacaggcatttaagcccttaaaccagaagtagtgataaatactgctgctttttattgaggctgagtctccaacacctaggctatagttgcagtagcgtgatctcagctcactgcagccttgacctcgggctcaagtgattcttccacatcagcctcccaagtagctaggactacaagcccatggtaccaccatggtgccatgccgggctagttttctgttttttttttgttttgtagagatgggggtctctatgttgctcaggctggtttcaaactcccgggctcaagcagtccactcaccgtggcttcccaaaaggctgggaatacagggatgagccaccatgcccagccagtggatgcttctgacatgttatgtgcaaacaaagccagacctctcgggcctcaggtttgcttcctgggatgatcctattctactgaactcacactgatccctataaagcaagcagcaacatcacgcttttgggaaaggccaatatgttttcctgtcgatcataccaatcccaggcgccctcctaacaggagggatccagactatggtgtccatcactgagcattcacccaacaaagccacttaaaaaaacagctcagtaaactagattcagaagtgatacttgtttgtaagacctatccacattactctggcttaagaaggcctgaaaacccagaaaaacacccagctatgggtgaaaatacttacaggtgaatgttttagtctaggattagcattaagatacttcaggaaaaaaataatggggaggatgagacaagaacaacaaactcaagacagctatgaggaaataaccattacccgttaagttttccctttaatgaccatgaggacaaagtcatgacaatgcagtcaccacccactttttgaaaaaaaaaaacaatgccaatgtgggaaccgactgagtcccaagcttatctactgtaggatccaagagagagacaatctcagtgttggagaatgcactgagaacatagaggagaaggctacaaagaacactgagtatacaaatgcatacagatagatgtgtatagatatatatacacatagatttcctgtccgctacagaggtctagaaacaataacaccccagtagcagtaagccctcagagcattcagatcttggtttctaaatgctgtcttctagtagagggaaccagggctccttaggaaaatggctgaatcaggctaggcgtggtgggtcacgcctgtaatctcagcactttggggggctgaggcgggcggatcataaggtgagaagttcaagaccagcctggccaatatggtgaaaccccatctctactaaacataaatacaaaaattagccagatgtggtgtgcacacctgtagtcccagctacttgggaggctgaggcaggagaatcgcttgaacccacgaggcggaggttgcagtgagctgagatggtgccactgcactccagcctgggcgacagagtgagactccatctcagaaaaaaaaaaaaaaaaggctgaatcaggactaggggaaggaaaagaacaagatgaaccccaaatatctcaatgtgtcaagttagtcttcaaaaaatgatggggacaaatgacagtttttgtggacatagaaaagcccatcctaaaatttataaggaatcctaagggaccctgaataaccaaaaacaatcttgaaaacttagctgaaggactcataggttaagatttcaaaatttactacagtaatcaaatcagtgtggtaccagcacaacaacagacatataggaggctggttgcggtggttcacgcctgtaatcccagcactttggaggctgaggtgggaggatcacttgagcccaggagttcaagaccagcctgagcaacttggtaaaaccttgtctctacaaaaaaaaaaagaaaaaatcagccaggcatggtgacatggtgacacacgcctatagtcccagctacctggtaggctgtgagccaagactgcaccactgcactccagtctgggcaacagagtaagaccctgtctcaaaaaaaaaaaaaggccaggcgcggtggctcacgcctgtaatcccagcactttgggagaccgaggcgggtggatcatgaggtcaggagatcgagaccatcctggctaacaaggtgaaaccccgtctctactaaaaatacaaaaaattagccgggcgcggtggcgggcgcggtggcgggcgcctgtagtcccagctactcgggaggctgaggcaggagaatggcgtgaacccgggaagcggagcttgcagtgagccgagattgcgccactgcagtccgcagtccggcctgggcgacagagcgagactccgtctcaaaaaaaaaaaaaaaaaaaaaaaaaaaaatatatatatatatatatacacacacacacacacacacacacacacacacacacacacacacacaccccccccccccccaaaggaagagaatccagaagtccttccatgtaatttttgacaagggtgccaagaccattcaatgggggagggacagtcttttcacaaatactgttgggaaaacagtgtgcacttgccaaggaatgaagctggacccttacctaacaccatacacaaaattagcttaaaatggatgaaagacctaaatctaagactaaaactaaaacatgaggcaaatccgcaaatcttcatgagttggacttagcaatgttttcttaagtatgacaccagaaacaggcaacaaaagaaagtaatagacaaactagacttcatcaaaattaaaaccttttttgcatcaaaagcttttctgcaaaaagcttttgcagaatgaaaaaacaactcacagaatgggaagaaaaaaactgcaagtcacatctgttaagggattaatatccagaatacacacaatactcctaaaattcaacaacaagcaacatgattcaaaaaaaatgggcaagacttggacagacatttatccaaagaagatagacaaatggccaataaatacgaaaagatgttcaacatcgttagggaaatgcaaaccaaaacccccatgagataccacctcatatccactaggacagctactatttaacgaaacaataaacattggcgacaatgtggagaaactggaaccatcatgcactgttggaaagtgatggctgcagtgggaaactggcagttcctcaatatgttaaaaataataggtcagacgcagtggctcacgcctgtaatcccaacactttgggaggccaaggcgggcagatcacttgaggtccggagttcaagaccagcctggccaacatggtaaacccccgtctctactaaaaatacaaaaattagccaggtgtagtggtgggcccccgtaatcccaggtactcgggaggctgaggcaggagaatcacttgaccctgggaggcagaggttgcagtgaaccgagatcgtgccactgactccagcctgggcagcaaagggagactccatctcaaaaaaaaaaaaaattatatgcagcaattccacttctgggtacataccccaaagagttgaaagcagggtctcaaagattttgtataccaatattcacatgtggaagcaacccaagtgcttttttttttttagactgagtctcactctattgcccaagctggagtacagtggcacagtctcagctcactacaacctccacctcctgggttcaagtgattctcctgcctcagcctcccgagtagctgggactacaggtgcgcgccaccatgcccagctaatttgcatatttttagtagctatggggtttcactatgttgaccaggctggtcttgaactcctgatctcagggaatccacctgcctcggcctcccaaagtgctgggattacaggtgtcagtcaccgtgtccaaccccaagtgcctactgacaatgtattgataagcaaaatgtggaatatatacacacaatggaatattactcagccttaacaaaggagggaaattgacatattacaacacggataaaccttaaggacattaggctatgtaagataaaccagccacagaagggcagatactgtccatttataggaggttcctagagtgaaaatcataaacaagtggtggtttccaggggctggaaggagcatgcgaggggagttagtgtttcatgggaacagtttaagttttacaaaatgaaaagttatggagttggattgtggtggctacacattatgaataaactgtacacttaaaagtagttagcagtctgggcaacatagcaagacctcgactgtacaaaaaaaaattagctgggcatggatgtgcacacctgtagtctcagctattcgggaggctgaggtaggaggaaagcccaggagagcaaggttgcagtgagccaggatcacactgctgcactccagcctggatgacagattgggatgctgttttaaaaaaaaaaaaaaaaaagtggttaataggatggtaaattttctatgtgtcttaccacaattttttacaattttaagatggaaacatgccaaaaggacacaagagtcaccttgacaggtcttctgatgtccaaatttgaagtaatttgaacatcaaataaatggttgcaatggattgcgacccagactaggagtccattagctgacacactgcatcaatggggagggaaggcgcctccatgcaggggcagggtgtcggcagaaggaacattggacatggaagctcatggatgggcagtggtggtggattcacatggaagttgtaagtgaaggacaaggatggagggtagaggtctgaagaggaacaggctggtcatgtgctttgaggatgcctccccacaaaatactccttgattaccaagagacatagtgtgacctgactgacagtggagcaatctgcctgggtcaccaaggttaacaaactgtatgcccctggagtgacatacagagaagagcgcagcatttctgtggctttcctgccacaaaagtgctgcctaggtctggtcaccatcatccagacccaggctgagggtgtactacagagaggtctgcgggcttcaccccactaggacgtgaaacacagatgccgagaggactgatgcagacagcaggagaaaactaaaggcaacacacacctcttgacagggaccctggaccaggaaaggacaagacactgttgggacagctggcgagatctgcatggggtccatggactggatgcagtgttcactccctgacttgggggaatatctaaattttgaagagagagggagaccaggggagacaatgtacacataatttcagtaaaatgtaccttttatctgtgaaattattttaaaataaaattttaaaagttaaaggactaggtgcagtgactcacacctgcaatcccagcactttgggaggatgagatgacaggatcacttgaacccagttggactggcctgggcaatgtagtgagaccctctctcttaaaaaaaaaaaaaaatcattagccaggaatggtgtcatgtgcctgtagtcccagctactcaggaaactgaggtgggagaatcacctgagcccagtcaaggctgcagtgagctgtgatcatgccactacactccagtgtgggtgacagagcaggacactgtctttaaaaaaaaaagtagtaaagaaaggctatatactgctgggtgcagtggctcacacctgtaatcccaacactctgggaagtcaaggcaggaggatcgcttgaggccactgcaacccagcctgggtaacagagcaagctactgtctcaaaaaggaaaaaaaaagctatattgtaatgtcttactatgcaaagctactcatgaaaaacttaagccaggcgcagtggctcacacctgtaatcccagcactttgggaggccgaggtggccagatcacttgaggtcagttcgagaccagcctggccaacatggtgaaatcccatctctactaaaaatacaaaaattggccaagcgcactggcacgtgcctatgatcccagctactcaggagggaggctgagacaagagaattgcctgaacccgggaagaggaggttgcagtgattccagattgcaccactgcactccagcctgggtgacagagccagactccatctcaaaaaaataaaaataaaaagaagaaaaacttactactgtttttgaactataattttttattgtaatatttttaacacttaatgcttacttgagtgtattaccaaagttaccccagggcaccccttcttcaatgaagtacccagaatgagttttttttttttttttgagacggagtctcgctctgtcgcccaggctggagtgcagtggcgcgatctctgctcacggcaagctccgcctcccgggttcacaccattctcctgcctcagcctcccgagtagctgggactacaggcacctgccaccatgcccggctaatttttttgtatttttagtagaggtggggtttcaccgtgttagccaggatggtctcgatctcctgacctcatgatccacctgcctcggccccccaaagtgctgggattacaggtgtgagccactgcgcccggcccagaatgaatttttataaatagtcgaagacacaaaagatcacactggtcggcttccagtgttgccgccagcaagtacgctccctgcgaaagtgcatcaagtcagggccccaggctcagcttctctaagaaccttcagtctgggggagggttgtgatgtgagtcacaggtccatgaattctttttttgttgtttttaaagacgtaaagacactttttctcctttcactgcttttctcctcaaaatgttgcatttccttctgcccttagtgttttccataaccttctgatcactttcagttattccggcagtacaatcataggctggctttacagtgaagcctttataatcttcttccacttcttctaaaattaaaaaatgaaaaccaactagcccaaccctcaaccaggctggaacgcatgtcctcctcagtgctcagttatggtgagagatgaggatgccctgggaagtgtccggcagtctcctctcagctccttggggtcatttctttgggtagcaatgtcaggtctggacggggcacaagtccctacatccaggtacccaacatgcctctgaggcagcaacgcttcccagaggggctggccctggtccccccacgacgagcttccatccccttactcacatcttcccttattttagttactgctcaacaggaccaaacacttcattagtagctgtttattgatcaatggtttgatataaagttatttcagatcttcagacttttgcccagatggaatcacaagcattacaaagtttttttcttaaaaataaaaaaaggataggggcaagttgggaggggaccaacctagcagtagtggcatttgagaataaattaacaaaaaaatttagtattaccatttattgatgacaaacacttaagttttacttacattccatggggagaaaaattccagcgtaaacaatgaatggaagcagtacttaactcgcagggctaccaggctttccatacggaccacacgcagagcctcagtgcacacacttctgtgtacagtaacacaacatcaaaagcaacacagctgtatacagaaacgtaggtcattcttttcagccctaatggagatgtaattaacagtatcgagcactctggaaaatcactctgcaggtttatatggactacatggagatcatatcctgtagtgtagtgaaagctaagtcctcaagagccatatgtatagatacacaatgttttttaataatctttaaaacagagatcaaagttcatttaagtcctgtttgcattaacaaaaataaaaatgaaataaaaatggaaccaaatgatcatctaaagtttaaaattcctaaattgtccaatttatacaactgtgggagacttattcaaggtttttgaaagtccaggactgtttcagctgaaccagagggcacacaatttgcatcactgaaactgtcctgggttagtcaatgaaataaaaatgtctaaccacatacacatggatatgatctttgtcggttagattattgataaagtcagtctcagacaagtttccaaactgtgctatttaactagatacaattgagaaattctcaaatgaaaattttatatagtgtcatatcaatcaaaagaaaataatgaaactaagaatacagatcactgttggaagagaaagcagtggtgatggtgtgggtactgcaggaggtggtggggccgtggcacactagaaaagttgggtcacgctgagtaggaagcatttgattttctctggtgcttttagctctggggccggtcaaaggcctctctctggcatggctgtccagggtttgtcccaatgtgtctgagtgagccagcttgagaaggggtcgtgccgtttcttctttcacacaggggaaaaaaaagaccaaacacggaggtgcccagggtgtggatctgctggtgtcccgggagaaccagctggctgggcagcccttcttccccacaggcagctgctattgcgtagggaccgccaggtcaccgagtggccatcacaacaaaccccagcacagtccagcccggccacagccgcctccttgtgtttctgttgtcttccctgctgctgcccacatcctttacccaccgtgtctctcggcccactggaggtatcagaaattccaaattttcaaagcagtttcagtattttcagtatatatgttgggattttataatggttcatggccagaaaaggttcagcacctcccacacctttaaggaagaaaaatgaaaatgacactagttttgaaatgtaagagaattaaagtactgttaaaaatgaaaagaaattggcaaacatcaggaagtacaatactaaaagccccagtttatgataacaaaagttttcccagggtatgccagtaagtaaaatacgcaaggagagtgtgtgtacttatctctgtggggggaaaggaagaaaatgagggaagaaatatatgtctatatttgtataaagaaacatacaggaaagatacaggagaaactagtaaaaatgtgatctatgggggaggcggtggggagaataggagggatgggatgggggctgtccgaggggaagattgtaccttgtaaaataatgcagagttctgaccatgtgaaggtatgaccaactcaaaaaggtttttttgtttttttttgggacggagtcttgctctgtcgcccaggctggagtgcagtggcgctatgtcggctcactgcaacctccgcctcccaggttttaagcagttctctgcctcggcctcccaagtagctgggattacaggtgcctgccaccacacctggctaatttttgtatttttagtagagacagggtttcaccatcttggccaggctggtcttaaacacctgacacctcatgatccacctgccttggccacccaaagtgctgggattacaggtgtgagccgctgttcccagcctcaaaatgtcttttaaaagtagagctttctgcccagagaatctggaaaactttcaggcaaaagggccagaaagtaactcaggcaaatatttccccgctgagtcagcagatagtgtaaactcaacacaaacgaggggcagcctccccatcatcagcgccttccccttcatcagtgcactcacacagacattggtccgtttcctgttcttggcatctctgtactttgttggtccaactcagacagcaactttaagatgttcagcgcagcctagtggggatggaaagaagggtaaagccacagccaccgcttgggaccacagcataatacactggtcaggcaggcaagagagttcctgctgcccagcaaacaggtggcaacttcttcaactctggtactactaaataaaactttgaatttttaatttaaaatacaaattaaaaaatattcagttacctcactgaatcataacctctgaaaatgttatatttttccttctagtatttttaaccatgtggtaaccagactgtataaatgttatatcctgctttctaacaaaaatctatcatgtatttttctttctatagagacagggtctcactaagttgcccaggctggtctcaaactcctaggctcaagcgatccttccaccttggcctcccaaagtgctggaattacaggtgtgagcctccacacccggcctatcatgtatttttcttcttattacattatcttcggagacactgttttgttttgaaacgcagtctcacccagctgcccaggctggagtgcagtagtgcaatcttggctcactgcaacctccacctcccgggttcaagcgattctcctgccttggcctcccaagtagctgggattacaggcacccaccaccacacctggctaatttttttttgtatttttagtagagatggggtttcaccacgttggccaggctggtcttgaactcctgagctcaggtgatccgcctgcctcagcctcccgcagtgctgggattagtgtgagccaccacaccccacccagagacattaatttcatgcatgcatgacatcccatcaagtgaatacatcacagtttacttagatttgttgatctgatcaattccttttctcagttttcttataacaataatttcatctgaacagaagaccaaagcaagtggtttttacagctgccagaacgtggacctgcaattccttgttctggtgagagatgaagtgagtgcagtctctgggtgagctgcaggatcccagttgcccctccaggccagcagggaaaaggaagggaaaggtgggctaaagctgatgagttctgatcaagagtgagaaatcgatccaatcagctatgacaaaaagtcttcaaaaatatgaacactatcaaacgattcattgctctcaaggtctatgggacaatctttctcccatcttcctcaggctagtaacaagctgaaccaaggcaggctccacataaacacacaacaccccaatccctcacccaaggtgtgacgtaccatatcatggcaggactccacatccttgccgataccatggctgatcagaggtggctgagaggagcaattgataagagatacaaattcgttcttgttgtttttggggaagtctttgtattcaacctaagggggaaaagagagctgaggctaggtagggaacagcaagtatgagtgggctggagggctgcagctccaggccccacaagcaagatcaccagctcttttttccaactcagccccactgtggccatactaacacctgccctgtcagcccagaaccttccaggaacctaggtgtctgctcagaagcccaagactgggagaagccatatcctttcctaccagacagaaagtgtcagcacgatgagtctgttctttgaaatccaaatttacaaccactgctagtggttagaagcttttagggttggcttgcatgttgaaatcttactaccaaaggataaagatatttctcttaccacatatgcttacaatacttctatacctcctacccttccatcactgctccccagcccatccctggacagaacttgatttaagaaaaaagtacaaagttcaaagttcattttctgagagaagccaaaagatgactgtcctgaggcacagccatcacagctcaggccagacagttacctggaatccctggactctggaaagatagtccagttgctcagagggtctcgtgagaggtccatggggtacgtggcctgaagagatgttattctttaaaatggtctcggctgtgggcgaggtgcccccatacaacaactctcgggctatcatggcagttaccgtggccttggcaggattcggagctgccctggtaaaatctttggtgtgatgtccttgactaactcctacagcctgggcgacctcgggcaccatgggaagaattccagcaggcagctgctgatgacttagataaggcatcctgaactcatcctctttattacctgggagggacatacacggtaaacacgaatccacatccacagcctggaaaaacgcaatgacaccatcaaaccccacgctggccctccccttggcacgcatggcagcgcagggaatcagggaatgataaagacactttgcatgcgggacctcactggctgggctcctgctgttattcaggacccatgcaaatcccagaatcacgttcagaggaagacgatattaagatcacacttactagtcccattttcatccccagagccaggttcaaaaaaggttacttttcttccatcccctggtttctttatgggtgtcttaaaaaagaagaagaaaaaaaaaaggccatgagcataaatcagatcactgaaaaattagctcctgctgtctaaatctacacaaagtccagtcagcaataactgtggcaatcggcagaaaaaccctgccccacctgaccactggcaccctgacagacacctgggcagagcctgcctccttctcctaatgcaccctcctgcccacacccctgcccacaaagagcatctaacaaagtgcactaacctgtgaatgctgagctgcactctgcacccacaggaagacgggaagcatttaaccagaaagagcagagatgctagacggtagagcccaccaaggtggggaaagaagctttcagactgaagctaaacaaataaatcaagaatatttcctggagctgatatccaattaaaaaataaggtgacattccaaaattaacacccttacggggaaaatgttattacctaagaattttgtctaacacaacatcacctttctaagaagtaacaaaggacactctgaatgtcctacaagattctgaaatgaaaaaccctaaagccaagtctaagatctatactggtggtatctggggtcccagtcagttattaactggccatgactgatgctgtttctgtcaatatgactggcagacatgaatgaatcaggcctgatttcaagtttatctcaccaggaccattcagtgatgggaaagaagaaggtcagccatggcttttgctgaggtcctgcttaccacttctggcagacacgaatttttctttttacgttccttttttgttgttgttgagacagggtctgtcgcccaggctgagtgcagtggcatgatcacagctcactgcagccttgaccttccaaggctcaatcctcccatctcagccttgtagctcgggctacaggtacaagccaccatacctggctgatattttaattttttgtagagacagggtttcatcatgttgctcagactggtcttgaactcctggattcaaggcctcagcctcccaaattacaagtttgagccaccacacctggccgtgaatttttcaacaggggattattttcatctgatgtttaactcacataggaaaaaagaaatcccaaacctaaactttggatttggcctgtctctactgtcacactgtcttattttgccagaaaaatcaaagcctattccacaattaacgaaagcctaacagttataaatctttcacacaggcttcatttctagagtgcaaatcacacttagtaatttcagtcctaattacccttcatcctcatcctacaaatagagaggagcaagctgccctccacaaagcgtccccagaccacaaagatactgacacaatcaacgatctaacccagagcctcctggggccagtggacatgcgaggcccctctgagcacattatggtccaaatggatgagacactcctcagcaggactccttgaactgtcaggcagataaagccttgccttgaagcctgcccctggaggtgccccagttccctagggtgaggcgagagaccatcttgcaatcagagagcccacagcactcaccttctcctctgacttgagtgcgggtttggtgggctgcgcctgcgggactttgaaaccaaggatctccagcatgttctcggctgcattgcgcttggccaccttcttgttggtgcccgttccttctgcagtgtggtttccaaccttcacctgcacaaagaagtcaaaacacagaccagtgcttaaaccttcagaataacaaccaggcaggaattggtgtgtcagcaaaataaccaactatggtcagaagcaagataacagcagtgccccgaacctggcctccttgtctctgagagctaattattaaatagtcaggagtttgggaagctggctgttaaacacagccagtattaaacatttaattatataagctgataattattttaacagaggtaatttttgactgcattttataatcatctgtgttctgagggtctgcccagctattgcatttgtacaatggaaacagtctgtgatggtgaactactgtacatctattcccagcattgccattggaagtatcactttgagagcttgaaatcagccatggtgggactatttataccacagaaatatacaaatgctacgtatcaaagatcataagctgtttattgtctaactctaaacctacaatgatgaaaaggttaataaagcaggttaatcttaaaagcatgagaagtctgcagccattacattgtaactagcacaaaaaactgaaatatcttcccgtctttgaaaattatctaattttgcagagaagccactcatatcatttacaaatgagtgatgttacatgtcttcattgtttcactttttcttttttcttttttgggatagacagggtctcacttcttcacccaggatggagtgcaatggcatgatctcagctcactgcaacctccacttcccaggttcaagcgattctcctgcctcagccacccgagtagctgggattacaggcgtgtgccaccatgcctggctaacttttctatttttagcagaaatgagggttcaccatgttggtcaggctggtctcgaacccctgacctcaagtgatccgtcatgctgggattacaggcgtaagccatcaagcccagcctgttttactttcatcttacctattaacataaataaaaaacatcaaccagccgggcgtggtggctcacgcctgtaatcccagcactttgggaggctgaggtgggtggatcacctgaggtcaggagttcgagaccagtctggccaacatggtgaaaccccatctctactaaaaatacaaaaagtagctgggcgtgatggtgggcacccgtgaatcccagctactcgggaggctgaggcaggagaatcacttgaacctgggaggcagaggttgcagtgagccgagatcacaccactgccctgcagcctggacaacagagcaagttgactccattcccctctaccccaaaaaaaatgtatctcaaccagtattcatgctacaaccaaaatctcaaatctacagtatgtatttgtcagtgacatgagcaacacctttgctgaactggatagtaataaaccattatgtgctgtctgattttataacactatcgttggtaactgtcacactgaaatatgtatgaaatttacaataaagtgtatattatttataaattgtactacacatcctttctgtcagtaaaatttataaaacacacatatatgtcagtataatttataacacacatcctttgtgtcagtaaaatttataacacacatgtatataacacccatgtatatatctataacatacatattcagctcattccaccaaaccaccctccccgaagaagagctggttgttaaacatgttccagcacatcactacttacaacccccttccaagttgattgtaataacaggcacctggctgctaaaaccaaaagcccaggtcacaagactcagagagtcaaagaaaccattccctggcctgggactaaattccaacctggccatctaccagccatttcatcttgggcaaactactgatcctctcagcaaactgcaacttccttttgtggaatgaaaggatcattcttttcctaccttctgactgcataggtaaaatatacgaggtcaactttctaagttataaattgctatacaagagataaggattctgtcttacatcagaaagcacttaaattcaaatcacaattaagttaagctgcctatgtgaaatgaccacttagctttgaacttaatcagctaagtacaaagaaatgttccatactaatctgaagtgtcacccaatctaaggaagaggtaaccctagattccagactccataagaattaggaggaagaggaacagatctcttgatactacttacaaaatttacctttggtaaagagcaatgtcataaaccttcaaggagatgtaatgaagaaaaacttctcccagcacccaccaccccaggactctttcttccaaatttcagtgcaacacacccacattcccaccagtgcacccagcagtagtgctggtgtgcagacattacattcatttttttaagcattaagataaacaacttaatctttgatatgtagcctttacagatttctgtggtatgtttaagctatcaaattattgcaagccacaaggtcttaataaggatcacagttggctgggcgaggtggctcacgcctgtaatcccagcactttgggaggctgaggtgggaggatcacaaggtcaggagatcaaaaccatcctggccaacatggcgaaactccgtctctgctaaaaatacaaaaaattagctgggcatggtggcacgtgcctgtaatcccagctactcgggaggctgaggcaggagaatcgcttcaatcagggagtcggaggttgtagtgagctgagacagcaccactgcactccagcctgggcgacagagtgagactccatctcaaaaataaataaataaataaataaataaataaataaataaggatcacagtcgctggcagaacatggcccacaggatccagcctcctcaggaaggtgtccagaccttgaaccgccatcagcccccaaggctggacgtggtcagaggaaggggcgcccatcatccatgcggacccacctgcatcacaaactccctgcggcgcgggaggcctcgctctgtgaggagcgtgtactctggctccttctccttttttgcctgctggatctgggccagtcggctaatcggattgatcccctggccatattctgggcttgtctgtggctgaggaacaaacaaggcagaaactctgtaatgttattcaccgcatgaacttggtcaactcagagatcaggatatgagaggagataagagattttgggttgacctaatggctcagaattcgattttttttaatttaacattttaacaatgaaaagatgctttattttttttatgattgttctaggtgattttaaggtcttagcaaaccaacatcaacatttcactataacgaagcgtcactatgactgcgacggctgttttttaacatatttcaacatatgacagtaaatgggcagaaaaaacataaaacactattcctacaactccccaaaagtctgagctatgatgggttcccaattttcttgaaaagaactcaaaatccaggaaccacttttttaaaaaagctcaagctgatgccacatggcaagaagaacctcagaatcccagttacttccttgaggccaccttttgtgccaaggaaccctcactctgctgatcagaagtgacttccaggctatattaagcaaaaaagggaaacaaaaggtatacatagtatgcttttatgtaagaaaaatttggatcttgatacagcatgaaactacatatactgaaaatcacaaagttccccatggaattatgtcccctttctggggttggggaaggggtcaatataatgctttgatagatccattagtgtggctcaaaaatccaaaagaaaaggcacacagcaaaatgtctcactcctaccctcccactatgggcctcctgcctggcacaaatctcctccaccttcagaacagcaacatggtcactgagacacaggcactgttatttcaccacgcgccccacagaccggcatggcgttcctgcccaataccccactgtgatcgccagggctgtgatgagcgccctcctgcacagatgtgtgtgcccgtctgcgggtacctctactgaactgacacaatgtccttatcttacctaacaggtggctcttgcagcacctctaaggggtctggcaggcctggggtgtggcacgttggtctcatcccctttcaccttggggacagcgaccagccttctaaaccccccacccatctataagtaatgaaaacaccttctgtgttcagaaaagttctcaccttgactatgggttttgttttctttttgattctaggctttactcgttcaactgcaggcaggggcggtaacttcttcagctcctcaagaacagctatggcggcatttttctttgaaatcttcttgcttttcccttcaccttcccccacaaactccccaaccgaaaccttggtcacaaagttcttcatgtggggtgggccactctcccgggccacctgtttcagagggaaagactgagtgaaagcggacagacacttattaaaagctccaaggcacactggctggcacacttcacacagacacagggaaggggaaccaaggacaagacctactaaatgaaaggaagcggggatcatttcaaatgctttctcgcctttcttcttacttctcaaactggtttatgctcttgagtctggtgagtcccaaacagtcaggcatgaaatagggagacctttttactcccatgcccctggctcacaggctgtcctgagtttagtgtggtccactgcaactggcaaaaaggaagctagcccagcaaagtccagaaataaatgcagtacaaatgctcaagtttagtatctgctctgagcctccagccaggactaggcctactaaatactggttgctatgtggccacaaaagagaacgagacaaatctcttaagcactgataaagagggattccccgcacacattaagtaaaaaaaaaaaaaaaaaaaacccacaaaagagtatatggtatggtagctttagtttaagaaaaataggattttatacaaatatctacacatatataaacagacacacatttataagctcatttttgcaaaaaaaaaaaaaaaaaaaaaaaaaacgaaggataaaaaaaatcaatgggctggacatggtggctcacacctgtaatcccagcaatttgggagaccaaagcgggtggatcacttgaggtcaggagttcaagaccagcctggccaacatggtgaaacccccatctctactaaaaatacaaaaattagctaggggtggtggtgcacacctgtaatcccagctacttgggaggctgaggcacaaaaaccccttgaacctgagagacggaggttgcagtgatccaagatcacaaaactgcactccagcctaagcgatagagtaagaccctgtctcaaaggaaaaaaaaaaaaaaaaaaaagcaagcaatgggccaggcgcggtggctcacgcctgtaatcccagcactttgggaggccgaggcaggtggatcacgaggtcaggagatcgagaccatcctggctaacatggtgaaaccccgtctctactaaaaatacaaaaaaaattagccgggcgtggtggcaggcgcctgtagtcccagctactcgggaggctgaagcaggagaatggcgtgaacctgggaggcggagcttgcagtgagctgagattgcgccactccagcctgggtgacagagtgggactccgtctcaaaaagcaagcaatgaaattagttacctacaacaggtgtgagggattagggtagacagacgggatgagacgggaatgatagttttgacttctggaagcatttactgttttacatattaaagaaataaaactaagtcaacaaagatggggaaagaatctaaaattaaacatgaacagaaagttagctgcatattaaagtgattacaatctccaaatggaccaaagacctacacagaggcgctaacatgcacaactctcagaagcaaaaacaggcgagtcttcatgactttgggtttggcaattggtttttaagatatgaaactaaaagcacaatcaacaagagggaaaaaaaaaagtcacacttaatcaaactttaaaacttttgtgtatcatggacattatcaagaaagtgattacaataacacagatagaaaatcaggctgggcagggtggctcatgcctgtaatcccaacgctctgggaggccagggtgggaggatcacttgagctcagaagttcaagaccagcctggccaatacagcaagaccttgactctacaaaaataaaaacaaaattagccaggtgtggtagtgtgcccctgtatgtagtcctagctatgtgggaggctaaaacaggaggatcacttaagcccaggagatcaaggctacagggagctatgatcacacaactgcaccccagcctgggcaacagagcaaaacctcgtctcaaaaagcaaaaaaaaaaaaacaaaaaaaaaacaaaaaaacttaaaaatctaaccgatattagccaagacactcaaaaagaaaaatagaagacttacactaccagattttaaaacttcctataaagtcacaacaactaggatatggttttgtgtaaggataaatagatcaacagaacagcacgaaaaagacctgcacatataaggtcactcgatttttggcaaacacaccaaaacaaattaaaaatctcttaaaaaaatagtaccagagcaactaactaggtatctgcatggagcggggtggggggaagaaaaaaaaatcaaaccatgatctctaactcataccacaacaaaaattagacctaggatcacttaaatgtgatctaaactaaaattacaaagactttataacaggagaaagcctcaagactgtaaggctggcaaagagttgaacacaaaagatatccaccataaagaaaaaagaaattcctcaaaattaaaaaccactggccgggcgcggtggctcacgcctgtaatcccagcactttgggaggccgaggtgggcagatcacgaggtcaggagttcgagatcagcctggccaacatagtgaaaccccgtctctactaaaaatataaaaaattagctgggcgtggtggcgggcacctgtaatcccagctacttaggaggctgagacaggagaattgcttgaacccaggagacggaggttgcagtgagctgagatggcaccactgcactccagcctggacaacaagagcgaaacaccatctcaaaaataaataaatgaataaaataaaaaataaactgctcatcaaaagacatttaaaaagtaaaaaagggggccaggtgcagtggctcacgcctgtaataccaacactgtggtaggccgaggcgggtggatcacctgaggtcaggagtttgagaccagcttggccaacagggtgaaaccctgtctctactaaaaatacaaaaattagctgagtgtggtgacacatgactgtaatcccagttacttaagaggctaacacaggagaaatgcttgaaccccagaggcggaggttgcagtgagctgagatcgcgccattgcattccagcccggatgacagagcaagactttgtctaaaaaacaaaaaaaactaaaaaaggggccaggcacattggctcactcttgtaatcccagcactttgagaaggccaaggcgggtggatggcttcagtccaggagtttgagaccagcctgggcaacatggcaaaaccccgtctctacaaaaaaaatacaaaaattggctgggctcggtggctcacgcctgtaatcccagcactttgggaggccgaggcaggcggatcacctgaggccaggagtttgagaccagcctgaccaacatggagaaaccccatctctactaaaaatacaaaattacctgggcgtggtagcgcatgcccataatcccagctactcgggaggctgaggcaggagaatcgcttgaacccaggaggcagaggttgcggtaagctgagatcacgccattgcactccagcctgggcaacaagagcgaaactctgtctcagaggaaaaaaaaaaaatacaaaaattagcccagtgtgtggtggcgtgtgcctgtagccccagctacttgggaggctgagacagcaggatcacttgagctcaggaggtcgaggttgcagtgaggtgagatcatgccactgcactacagcccgggtaccaagtgagttcttttctctaaaatcaaataaaataaacttgttatttcaaaatatacatatttcctagctctatctcctaaccgagagccatggctctccagcaggaacaagcatgctagcaccctgtcctgtctctacacaccactcccaattagaaggaaccggatcttcttggaggaatggccaagaccatttctattagaaatttatgtttccactggggctaaagctagagcaggggaagttcaaagtgaggctaaaacattttgttgtatcagaaagcatggaagttctcaaaatgtgaagaggggaggtgcaaaggttatttaataaaggactgtctcagccaggcatggtggctcaagcctgtaatcccagcctgggcgacaagagcaaaactctgtctcaaaaaataaaggactgtctcttcaacaaacagtgcaggcacaattagacatccaaatccaaaaaaaaaaaaaaaaaaaagacaaaaacatcccttatgtcacagtatatatgaaaactaactcgaaatgaattataaacctaaatgtaagagctaaaactaaaatttctaaggaaaatgactttaggttagccaaatgtatctcagcatacacaaaaattattaactataaaaaatttaacaaactacacctcaccaaaattcaatacttctgctttttgaaagtcacttaaaatcaaacgacaagccacagacttaagagaaaatatctgcaaaatacttatctgagaaaaaacttgaattcagaatatatatagaacctccaaaactcaataataaaaagacactcaaaaaaactggcaagatataaacctatatttcatcaaagaaaatagtaaaataaaaacacgaaaagaagctcagtattgctagtcttcatggagatatataaattaaaaccacaacaagatactactgactacctgctagaatgactttaaaaaaaaatttttttttttttttttttttttttgagacggagtctcactctgtcacccagggtggaacgcagtggcgcgatcttggctcactgcaacctctgcctcctgggttcaagcgtttctcctccctcagccccctgagtacctgggactacaggtgcacacaaccatgcccacctaatttttgtatttttagtagagaaggggttacgctatgttggccaggctggaataactaaaattttaaaagctgacaatacccaagtgttggagaggatgtagagcaactaagcctctctcatatattgcaggtgaaatgcacaatgatacatctggtttagaaaacagtttggcaacttttttttttttttttttttttttgagacagtctcgccctgtcgcccaggttggagtgcagtagcatgatctcggctcactgcaacctctgactcccaggttcaagcgattctcatgcctcagtctaatgagtagctgggattacaggcacatgcctggctaattttttgtatttttagtagagacgaggtttcaccatgttggccaggctggtctctaactcctgacctcaagtgatccgcccaccttggtttcctgaagtgttgggattacaggcatgagcccatgagcccagccaacttcttataaagttatttatttatcatgcaactcagcaaatccactcaagtatttattcaagaaaaatgaaaacatgtctccacagatgtatataaatgtttacagtagatttattaataatcaccaaaaactcacaacaatacaaatcttcaactggtaaatagatacactgtagtgtgtacacactatgtaacactcttggtgataaaaaggaacaaactactgaaacacacaacagcatgaataatgactccaagctaagttaaagaagtcagacaaaaggcaatatactctattttccatttatgtaatattcttaaaaaggcaacactatagggacagaatgagatcaatgcttgccagagcctgaggacagaggggagagactgactgcaaagggacacagggaactttactgggtgggagatgttctgttttgactatggtgctggttacagaaccatatacacttatcaaaacacatcgaactgtgcacttacacagggtgactttcactgtaaattatacctcaagaagcctgaccaccccttcatccaaaaaataactgatgggggcatgttaaagggcacaagggccaatttaaaggacaatttggacatcaaaatgggtgacgataacaatggagtaatactttgggtttaaaaaaaagcagcaatgcatctataccgatataattactataagaggggaggaaggaaactttttctttactgtagaatgccagcttggaaatgccaaaaatcataattttgacatctaccacagtgataatcaatgccagcaagaatcatcaagatccctgaggggtgggtgtggtggctcacgcctgtaatcccagcactctgggaggccaaggtgcatgcctaatcctagctacttgggaggctgaggcaggagaatcatttgaacccgggagccagaggttgcagtgagctgagatcacatcactgcaccccagcctgggcaacagagcgagactccgtctcaaaaaaaaaaaaaagattgctggaaccaccggggagacctgtgaaggcccagccttcaaacatctcctcagaggttaggagttaattacaaagtgacatgaaatgatgctctgagaaggatcaatatcactcccatggtgatcctgccaaaaaacacataaccagacctaatcataagtaatccatcagaaatacccaaattgagggccactgtacaaaaataactgacctttaaacatgtcaatgtcatgaaacacagagaaaggctgagaatgtactgcagatactaaagatactgcagagactaaagagaaaggtcagctaaatgtaaggtgtgagtctgcatcagacactagagcggaagaaacatttctataaaggacatcattgagacaactggtgaaatgtgaatgtaggatgtgtattaggtaacagtactatagcaatgctaaatttcctctacttaatagattgtggttatttaagagaatgtccttgctcttaagagatacatgctgaaatattaggagttaaagggtatgatatctaccactttctgtcaaataatccagcaaagtaaaaaacagaaaataatatgtatatttatggaaaaagaaaaagcaggctgggtgcagtggctcacacctgtaatcccagcactttgggaggccaaggcaggcagatcgcttgaggtcaggagttcaagaccagcctggccaacatggtgaaatcccatctctactaaaaatacaaaaattagccgagtgtggtggcgtgcacctgtaatcccagctactcaggaggctgaggcaggagaattgcttgaatccaggaggcagaggttgcagtgagccgagatcatgccactgttctctagcctgggcaacagagttaggctccgtcacaaaaaaaaaaaaaacaaaaggaaggaaggagcaagcaaatatggtaaaatgttaaccactggttaatctaagtgaaagttatattcattgtcctattcttgtaacttttagatagatttgaaatttttgaagtaaaaaattgaaaaaatgtctaggtaagaaaagtgagcctccaaaatggatgcactctttttttttttggtgtaggggaaggaggtagcggagaatggggggtaggaattcagcacagtggccaggagcagaggtgtgggaaggacctggcctgcttaggcacccgtggactgattttaaagaactcccataggtgccgcccacacccaagggcagagattctgaaacacttcttcccacaacagtgctttccctgtcctcaggttagactttggagggacaggtcagccaccctgatggctcacttcaaatgcacagcccaccctggccctctccaacggcttgcattgtctgcccacatcaagatccccccaatctaaatctggaggatcacctggattgcatgtggtgtgagcatgtcacaattgtctcccgatgaccgtatccatcagcaccatcacattttctaactaaaactgtatgttttatcagaagtcaaactggctgggcacggtggctcatgcctataatcccatcactttaggagatcaaggtgagtggatcacctgaggtcaggagttcaagaccagactggctaacgtggtgaaaccctgtctctactaaaaatacaaaaattagtgaggcatggtggtgtgcacctgtaatcccagctactcagggggctgaggcaggagaattgcttgaagccaggaggtggaggttgccataagctgagatcgtgccattgtactccagcctgcgcaacaagagcaaaactccatctccaaaacaaaacaaaacaaaacaaaagtcaagctgtatatatttttccaaaaaactgttcctgtcttcccctattaaaacacctaacgaagcttcctatgtgacagatttaattaccaaaaacttaatcaaaaattattctgttcatttattcagtaactatttcctaaacatctaatacatgccaggcaaccttccagcggcaaaagaaaggaaagaccttgctcaacataataatgcaagctagtaaaaaattcctgatatttgagttaatgaatataagcactcacgccaccaactacatgcaagctgtgataaattactttaaaagatcaccacgagagggcactcctacaattcttttatgtgactactgtcaagattcctgaacacagagttgagagccagatctgaaaccttaacaaaagtgaaggaggaaaggaagcaatctgaccccaaatcccacagaacaaaaacataaaatagcaatctctaagtttccagaaatctcagtgactctgggtagcagcaagagtgagcaggtggtaagcttctcaggaatccaaggctctggcccaagccgtcaactctgcacatgaggtgacccgggaagccagccaggcatctcccactccccacggtcttggtacccctcccccacaacctgcaaaaatccactctcatgacagactaatctgtcagcaggggagaaaagcaacacttctcccctttcctgaaacaggtgccgggggagacctcatgactccttgggatgcagctcccatctttttcccactcaactgtgagcccaaacagccattctgaatgtcccctgtctcattccctccccaagtgcatcccagcctccactgatggagggagaaaggccagggagggaatgtagggccaggtgagaagattccagccctagatccatgtcggtgctctggactccaagagaacagtgtaaacctgctcttacccactgagggtggaggggcaggaatgagtgtcagaggaatggagaggaacaaacaagccctcgtacccaggtgggccacagtagggagccctggcaactacaatcccacctctggcccatggcaggcagagaggcatcagcagggtgaggtgagaaatcatcatcactcggccaaaggatggagcactgaagctgggttaagtttagggtgctagcacataggaggagaaggtatacatcacctgtaactgtaaagaatacttcaaagatattttacaggaatataagcttcagataggctttttaagaaataagccataatcaagcacgtaaatcaaaagaatctgcaaagaatctgctgtgggtcagaccttatttctaaggtaaacattaaaaattctcccttactgggccgggcaaggtggctcacgcctgtaatcccagcactttgggaggccgagatgggtggatcacctgaggttaggagttcgagaccagcctgaccaatatggagaaaccccgtttctactaaaaatacaaaattagctcggcatggtggcgtatgcctgtaatcccagctactcaggaggctgaggcaggagaatcgcttgaatctgggaggtggaggttgcagtgagccgagaacacaccattgcactacagcctgggcgacaagagtgaaactcatctcagggaaaaaaaaaaaaaaagctctgggttgaaacccgggcgccgccaagatgccggctcattactcttctctcatggatcctgacaccaaactcatcggaaacatagcactgttacctatcagaagtcaattcaaaggacctgcccccagagagacaaaagatacagatattgtggatgaagccaactattacttcaaggccaatgtcttcttcaaaaactatgaaattaagaatgaagctgataggaccttgatatatttaactctctacatttctgaatgtctgaaaaaactccaaaagtgcaattccaaaagtcaaggtgagaaagaaatgtatacactgggaatcattagttttcccattcctggagagcctggttttccacttcacgcaatttataccaaacctgcaaacaaacaggaagatgaagtgatgagagcctatttacaacagctaaggcaagagactggactgagactttgtgaggaagttttcgaccctaagaatgataaacccagcacgtggtggacttgctttgtgaagagacagttcatgaacaagagtctttcaggacctggacagcgaagggagcccgggcagccgccatctccagagccctgggcagcattttccagcaagatgtacacaatcttttgcctttattcgtaacgttttatatagaagagagaagagcatgtctttacttgaaaaactcttgatcaagaatttgggtgggagaaaagaaagtgggttatcaagggtgatgtgaaattttctgcagcattaagctggcgcttaataaaaataagtaacaaaaaaaattctcccttacctccctcgtccatttggatgaactatatgtcttttaaggcaacatatattaaaatgtaccttatttcccactttgatcagacaattcattgattattgtttttagaacacaaggtctcaacaacaaatgaagttattaaacaggaattgagggcagacgctagacaatgacaaaaactgagtccttttcaaaattactctgaagagacctttagggaccacaaatgcttttgagactgatctaagtgatgaactagcccctccacccttccctatccagaagaatacacatatgaacactaacacaaccatcttcagactgcttcaggaggtccacacaccaactgaagccatcatgaactctctacacatccatgaatgccccttagttacggactcccagaagaagagaataaacactgcttcactaaatataaagtatgaatcttaaatttggaggttcacattatgtgaagattattccaatgatatttaggggaaaaaataactcttatgatgaatgctaacaggattttagaatacaaagtcctacatgtaaaattagcttacctcgaaattcacaggcaagttccgtttaagtgcaatctcaaacacttgacttatttcagatttattgagattttcttcttcggattctcttccattcacctgtaagaataattgtttagtagttagctcttattaaaatagtcaatggccaggtgagttggttcatgcttgtaatcccagcactttgaaggctaaggcaggaggatagcttgagcccaggagtctgagaccagcctgagcaacatggcagtttgagaccagcctgagcaaccttgtctctaaaacaaaaacaaaaacaaaaacaaaaaaacaaaacttaggtggatgtggtggtggtacatgcctgtagttccaactacttggagggctgaggcaggagcattgcttgagcccaggagatcgaggctgcagtaagccatgatcatgcgccactgcactccagcctgggtgacacagcgagacgctgtcccccacaaaaaaacacccatcaacatcctagctgcaatggtaaaccttaaaagcactgagctttggctttatgaatttaaccacacacataccaagtgtcactgaatttaagaggttaaaaagatacatgtcctgtcaagtttgagtcaaattgtacctcataagttcaccaaaaacaatccgcacataatagacctttggatatgtgtcagcctgactgtggttcagcaagatgtcactgctgctcggaacagtgacttccaaaagtccttctcaagtagtgggaagccacattttggaaaagtcaaaatacagacagatatatgtgggacgtggcaaattcagattaagtctgtccacatgagtatgcaggcttatttgaacataaattccctggaaaccactttttttttttgagatggagtctcgctctgttgcccaggatggagtgcagtggcgcgattttggctcactgctacctccacctcccaggttcaagcgattctcctgcctcagcctcctgagtagctgggattgcaggcatgcgccaccacacccagctaatttttgtatttttagtagatacggggtttcaccatgttggtcaggctggtctcgaactcctgacctcatgatccacccacctcggctcccaaagtgctgggattaaggcgtgagccaccacgcccggcgggaaaccactttaagagaatgcagccatgcgcatggcagtacacgactattgccccagtactcagcaaggtgacagttgaggatcagttgagcccaatagttcaaggctacagtgagctgtgatcatgcctgtaaacagccactgaactccagcatgggcaacaaagactctctatctctataattaaaaataaagaaataaataaggatgcgatgaaacacattacaaaactgccatgtatctcatactcaacggctgttggcaaaaaaatacaaggcgcaaactaataaagtctcctcaacaaaggcagagattccatctttggaacaaggttcacttaagagtcgtccaatcagggatgagattaaagaggagcaaggatcttacttctgcgtgctgataacatggattttatactgtgctgtagtgataataagaggaactagataagctcaaagcttatctagcaaagtcccccaaaacaaaaagagctgtttttcttcacattattgcttattttgtcaaagaatttataaagtcctgcttctgagattagaactatctgaaaaggaacccatggctgaaactgctaaataggcaaggtataggactatccaagattttatctgttgtgcatttccttatgtttatcaggtatattccacctacactcaacttttttttttttgagatggagttttgctcgtgtcgcccaggctggagtccaatggcatgaccttggatcactgcaacgtctgcctcctgggttcaagcgattctcctgcctcagcctcccaagtaggtgggattacaggcacccaccaccacacccggctaatttttttttttttttttttgtatctttagcacagatggggtttcaccatcttggccaggctattctcgaactcctgacttcaggtgatccgcccaccttggcctcctgaagtgctgggattacagacatgagccaccgtgtctggccactgaatattaaaagctgtaattggctgggcatggtggctagcgcctgtgatcccaaaactttttaaggacaaggtgggtggattgcttatgcccagtttgagaccagcgtgggcaacatggcaaaaccccatctttataaaaaaaatacaaatattagcaggtgcggtgtcgcacatctgtggtcccagctacttgggaggctgaggggagaggatcacctgagcctagggtgttgaggctgaggtggctatgatcacgccactgcattctagcctcagtgacagtgtgagaccgtgtcacacccaccaaaaaaagctataattaaaataaaacaaactctaggttaaaaaaatatatatataaccaagggtataatcctggacaaataaatttattccagatgctctttgtaattccttctatccttccataatcttttctttccaatctggtttcagtgtatctcacctgagtcaaaactactttcatagcacttgtggtggtttattaacctacacatacttttttttgttttttggagacagtgtctcacactgttgcccagtctgaaggacagtggtacaaacatagctcactgcagcttcaaactcctgacctcaagcaatattcccatctcaccctcctgagtagctgggactactggcataggcaccactcccagctattttttttaatgttttgtagagatggggtctcactatgttgtccaggctggtcttgaactgggctcaagcaaccctcccacctcaacctcccaaagtgttgggatttataggtgtgagccaccatacccagcccacacttgtatttttgtttaaatcctaagcagaaaaagggtctacttttttatgagtgaatccttaaaactggcaatttgcaagcaaggtaccttaaaggctggagttctacagaggtttggcttgaaatttacaggttggtgcaaaagtaattaccaatctaatagttaaatagatattaaacttaaaaaaaaaatactgtaagcttgttcaacaaatggtgctaggaaaactagatatccacatgcaaaataataaggcaggacccttaccccacaccactaaaaactcaaaatggatcaaatacttaaacataagagctaaaacagtaaagttcctagatgaaaacataggggaaaagtgttatgacaccatctggtgatttcttacatatgacatgaaaaccgcagacaacaaaagaaacattaatattagacttcatcaaaatttaaaacattcatgcatcaaaggacactatcaagagagtgaagaaaacccacagaatgggatttgcaaatcatttatctcataagggattaatatccagaatatataaagaactacaactcaacaataaaacaacccaattagaaaatgggcaaagcacttacacaggcatttctctaaagaaatacaaatagtcggctgggcacagtggctcatgcccgtaatcccagcactttgggaggccgaagcaggtgggtcacctgaggtcagaggttcgagaccagcctggccaacatggtgaaataccatctccactaaaaatacaaaaaactagccgggtgtggtagcagacgtctgtaatcccagctacttgggaggctgaggcaggagaatcacttgaacccaggaggcagagattgcagtgagctgagattatgccactgcactccagcttgggcaacaagagcgaaactctgtttcaaaaaaaaaaaaatccacagtaagataccactcacacccataaggatggctgctatcaaaagaaatggaaataacaagtttttggatatggagaaatgagaagcttccagtcacttatgaaaatgtaaaatggttgtaccagatttggattttattaaaaataaaatagaaaatgggcagtgcgtgcggtggctcacacctgtaatcccagcactttgggaggccgaggcaggcggatcacctgaggtcaggagttcgagaccagcctggccaacatggtgaaacaccatctctactaaaaatacaaaaattagctgagcgtggtgacgcgcacctgtagtcccagctactcgggaggctgaggcaggagaatcgcttgaacccaggaggcggaggttgcagtgagccgagatcacgccactgcattccagtccagtgagactccgtctcaaaaaaaaaaaaagtaagttaattaatttaatagaaaatgtaaaatggtacagttgctatggaaaacagcttggtagttcctcaaaaaattaaacatataattattatatgatccaggaattccacttctagatatacacccaaaagacctgaaagtagcaacttgaacacatttttatacaccagggttcacagcagcattcacaatagccagaaggtaaaaacaacccaaatgtccatcaacagatgactggaaaaacaaatatttactattcataccataaaacattcacccttaaaaaagaaatgaaattctgaaacatgctataacagagacgaaccttgaaaacattacagtaagtaacataagccacacattaaaaaaaaaatccatttttatgaagtgcctaggctaggcaaatgcatagaaacagaaagtaaagtagaggttaccaagggccacgagcaagggagtggggagtaactcttcaatgagtccagaatttctatttggaatgatggaaaggttctgaaaattagtagtgacagttgtgcaaaaccaagaatgtattttaatgccactggtgcacttaaaaatgtttaataattttagatgtatattttgcctgaattttttaaaaagcagcaacaaaaatgtttcacaccaaatattaagataccagaaatcatcaacacagtaacttgtgctaaccccagattaactcatttttgtgcacaacagaataaagcttgacagctgtttccctgaagagcatccagagttttttttaatagatgatctgtttaaaaaaaaaaaaaaaaaggtccacatgctaagaactgtgccaatgagaatgctctttatgagcagccagaacacaacttggaaataaactaggtgctcagactgtcgtaagactttgaatgccacgtacatgccccaattttcaatgttttgttcattgtatcagcccaattaggtttaacttttatttttatttacaacctatttcaaacatacagaaaagtacagataataacataacaggcaatttcctggatttatccaatgtcaatagttaagtactactgacgtcggactgtttttttctgttttaagaaaaacaatgagccacgcatggtggctcacgcctgtagtcccaacacttctggaggctgagatggatggtttgtttgaagtcaggagttcaagatcagtctaggcaacaaagtgagaccttaatctctacaaaaaaattttaagattacccaggtgcagtggagtgtgcctatagtcccagctactggggtggctgaagcaaaaagatcacttgattgattgcccaggagtttaaggctgcagtgagctatgatcgtgccactgcactccagcctgggtggcagagcaagactccatctcaaaacacaaggcaacgggccaggcgaggtggctcatgcctgtaatcccagcactctggaaggccaaggcaggcggatcacttgaggtcaggagttcgagaccagcctggccaacatgacgaaaccccatctctactaaaaatacagaaagtagccgggtgagactctgtctcaaaaaaagaggcaatgaaggccatctcactatcattcccagggcagttaatcactatcctaaagtgggactgtatctttcccagccgtgtttttaaatgaatataatttggtgtttttgaaaactcatatacctcattctcagaaattgcctttaccattattataaatccaaacttataagtttatactaataactgtaattccagcactttgggaggtcaaggcgggagggtcacttgaggcctggagtttgagaccagcctgggcaacataataagacctcatctcaacaagaacaacaacaacaacaaatatttattttttattttgtttttgagatgaagtctcgctctgttgcccagactggagtgcagtggtgcaatcttggctcactgcaacctccgcctcctgggttccagtgattctcctgcctcagcctcccaaggagctgggactacaggcacaagccaccatgcctggctaattttttgtatttttagtagagatggggtttcgtcatgctggccaggctgatctcgaactcctgacctcaggtgatccacccacctcggcctcccaaagtgctggaattacaggcgtgagccaccgtgcccagccaaaaaaaaatttttttaaataacaatttatactaacgaaatgctccttttctattttatatacatgtatcaaggttccacgtaagactgatagaaaacaatgggtctactgctccgttctacaccctaagccagtggttctcaaccacagcagcactacaatcacttgggagcttcacaagttcagattctggagcccgctccagacaactgaactcaaatttttgagggcatggcctggatagcagttttatttatagtatttgtttattttttaaataagtccccaggtgactggagttgcgattcactgctctaagccattgcttccagaggagtatcattaggaacaaagcagccagtaaaataaaaatgcaaaaaaacatatttgaaaatgaaattattttgctcttttacacaatttttttcttttgagacagggcctcagctctgtgccctcagctgcagtgcaatggcataatcagagctcactgcggccttgatctcccaggctcaagcaattctcctgcctcagcctcctcattagctgagactacaggtacatgccaccatttcgttttttcaaatatttttggtagagatgaggtctctccatcttgtccaggatggtctcaaactcctaggctcaagtgatcctcccacctcagcctcccaaagtactggaattataggagtgagccaccgtgcctggctcattaaaaatttcctattatccagactgacaaaatgttccaagtagggaggcagcaaatggttcaaaactaatctacaaaaaccattcccagtaaaatgaggaaggtttagtgggcacttagtcttatcttcacaatgtaggaattactgttaacactgattccatagtgtatagttcagcaataaaatctaggcaacattaagaaagaggccaggtgtgatagctcatccctataatctctgcactttgagaggccacggtgggcggatcacttgagcccaggagttcaaaaccagcctgggcaacatggcaaaacccgcatctctacaaaaaatacaaaaactagccaggtgtggtggcatacacctgtagtcccagctacgagggagactgagatgggaagatcacttgaggccaagaggtcaaggctgtagtaagccacaatcgtgccactgcactccagctagggcgacagaggaagaccctatttcaaaacaaaacaaaacaacagaaaagaaagaaatgctctgaaccacacttaaccctcacagtatgctaggaaaattagccatcaccatttattatctggctccaacagactcttctgtttttctatatctaaagtcattttacaaataatttaccaaataaaaggatgacaaaagccattttattagacattttaataagaacttaaacacagcaaacccagcttcttatcccaatgtttctaatttggaaggcatatatacctgaaaaaaagcaaggtcctctatatgcaactaactgctcatcacctgatgcacctgcagctggggcacagcccacctgtagcgatgtcagattccaagtccatctccaacaggttctaacttaacaggacttcagattcttcgtgtactggcactgtcaaacacactacttttgaaacagactcataattctgttgaagagaaagcagccatttccttgctccattaagtgcaaaatgctttcatttttggattataaacaccaacagaaggatcaatccagttatttttgtcatttttatatctattttcttccaatcacctttggacacacacctccttgtgcatttgtccagttattttgttgacaataagtggtaagaaataaatgttggcggccaaacataaaagataaaagaatgttgtcacacgtacttttttttttttaaatgcaaacaggatgggagaggttcttgtcgaaaaatgttgcatgatgaagtcctttctgttgaatgactagatgagaatataccacatttcctttccatacatcagataaataatcactagctgattcttgagtttggggaaattcatctatgctagcatctgaagactcacagtctgcgattttgcttagacaatctcaccatcatcattacagtctggagtgctgccatctatctgtctttttgtgttcatcttctgatttgttaatcatcagaaatgtcttcctctgtcaattctcttctccttgacattacagatgaaaaatagaaaaattctggattctcacctgggttcaatgaaagcaaaaaggagactcaaaagatggtgtctctagtcttctttttttaacctcttggaagacaatgcaatagcctaggcaaggccataggacaataaaagaaggtgtcatcatgacaattacttcactattgtatatccaccccagaggctttatcattcttccattttcttatgattttcatctcatctggcatatttgggagtagatgatgaatagtattgaaataattatgtggaataacaaatagcaaaacgttcaaaacacaggaaaattaagatccctaagatcccatcatgtaaagacttacaaaaggatccaaaagacccctatgataattgtaagacagaaagagttttgcactattttaaaatataagtatactttctctcagttctttgtaatacctctaaaaaagaatacaactcatgcaatatcattccttaaagagcttgaaaaagcagcttaaaaaatgaaaacctggctgggcgtggtggctcacgcctgtaatcccagcactttgggaggctgaggcgggtggatcacgaggtcaggagttcgagatgagcctggccaacatggtgaaaccccatctctactaaaaatacaaaaattagccggcggtagtggcacgcacctgtagtcccagctacttgggaggctgaggcagaagaattgcttgaagctgggaggcggaggttgcagtgagccgagattacaccactgcactccagcctgggcaacaaagcgagactccgtctcaaaaaaaaaaaaaaaaaaaaaaaaaaagaccaagcgtggtggctcacgtctgtaatcccagcactttgggaggccgaggcaggtggatcacaaggtcaggagattgagaccatcctggccaacatggtgaaaccccgtctctactaaaaatacaaaattagctgggtgtggtggcacatgcctgtaatcccagctactcgggaggctatggcaggagaatagcttgaatcagggagtcggaggttgcagtgagccgagatcgcaccactgcactgcagcctggcaacagagcgagactccgtcttaaaaaaaaaaaagaaaagaaaacctgagccaggcacaagcatgcctgcagtcccagataatcaagaggcaaaaggatcacttgaatccaggacttcaaggccacagggtactatgatcatgtctgtgtacagccactgcactccagcctgggcaacaatagtgagacctgtctctgttagaaaaaaataaaaaagaaaaagaaaactaggtccaatgaacactgaggaaacaagaagggttaaagtctccaatttcaggccaggcgctatggctcatgccagtaatcccagcattttgggaggccgaggcaggtggtggtcacttgagctcaggagttcgacaccagcctgggaaacatggtgaaacctcgtctctaccaaagatacaaaaattaggtgtggtggcatgcacctgtggtcctagctacttgggaggctgaggtggaaggactgcttgagtccaggaggcggaggttgcagtgagccaaaatcacaccactacactccagcctgagtgacagagtgagacaccatctcaagaaaataaataaataaacaaatgggtctctaattttaactttactcctaattaagtatgcacctatcccaagtgaagataaagactcaaaaccagaaagagctgcatttattcatttttacaaaagtataaaaaagtattttaaaaacttcaggatgtttacggtggctcatgcctgtaatcccaggattctgggaggccaagctgggcagatcatttaagactaggagtttaagaccagccagggcaacatggcaaaaccccatctctacaaaaaatacaaaaattaacagggagtggtggcatgaatctatagtcccagctacttaggaggctgagatgggaggatcacctaagcccagggaggtcaaggctgcagtgagcctgcatggagggcctccgcactccagcctgggcaacagagtgagaccctatctccaaaaaaaaaaaaaggaaagaaagaaacaaaaatacatacacactgaaacaccaacaggatcacactgtatgcacagtaacagctctgcatcttcatcccttttcatgcctgcctatatgagatatctcactctggtactcaggggataaacgtagccaagtttttaaccactttcctagtaacagacatttaagctagcccccgtttttctctattacagatactgcagctatgaccatactgctcctaatagctcagacactgagtaaaactcatacttcattagcacaaaccttagattaaataaacaaataacccatgcactttcttaacttggggcctttgcaactgccactccctctctgggcatacactgtccctgccctttgctgatctttagtatcagccgaaatgtctcttcctctgaaaagactgctctgaactcaccaccattattccaacctaaatgagatactttacgttcttctaattcttgtcatttttccatccttgcactaaatgcactttttgctgatattaatgttaatgtctggcagctccatttgactaagttcacaggaaaagggatggcgctgactgtttcaactcagggtctagcacagcgcctggcatggagggcccagactatgcctgccctgtagacagcaagcgctggctttactgcatatcttctagagaagatgcactgatccaccacacaatcacatgctccacaaatatgccacagctaaactgacaatttgtttaaaatgatcatttccaatgctggcaggctgtggacagacgggctgcttatggcctgtcagcaggttgtaaaatggcaccctctttctgtggagaacttggccatatgtaccaccatgcatacccgctggttcagcaattccacttctaggaccgtggacaaagactttaactgcaacgatgttcttcccgacccattttataagagggaaaatgcaaacaacctaaataatcaagtccctgttggaaaataaagcagtgcattcacatagtggaacattttgtagccattagaaagtgcttaggtgtgtgctgaatttgggtcctccaaggaattttaagtaaatgacgtaacatattcaagatatacacatcagtgaaaaaaggtggttactgtacactgtcatgccatttttatgaaatagataggcatctgtatttacttgtatatgtgcttgtcagtgaatatacaccaaatggttacagtgattatccgcaagtggtaaatttataaatcattcattgttccttgtttttgaatttaaaattttttatagtccatatgcactatttttaagaaaaaaaaagttatcttttaaaactgtctctctttattcccctactgcctgctatcagagagcctggtaaaatcaagggcagcacatttacgaaagaggccaagtgtttcacttattgcaggctgagcattcctaattcaaaaatccaaaacctaaaatgctccaaaaatcaaactttttgaacaccaacacaatgccacaagtggaaattccgtacatgacctcatgcaacgtgtcgcagtcaaaacagtttattcaatacccccaagaaaaaaataaaattacattcaggctttctgtataaggtgtatacgaaacacaaataaatttcatgtttagacttgggtcccattcccaagatatcccattacgtatgatggaaatattccaaaatcaaaaaaagctctgaaatccaaaacacttctagtcgcaagcgtttagggtaagggatattcatctagtacttcaaataagtcttttctgaattaatgactcttcacttcactggctaaggccagtctttaagccatttctgacaggcacggtctctacttccaactctacagagctagaaaaggggcatagagaagaaacgccaaagggcacaagtagatttaaacaccactcccagcaaagctcctcagagatttcataggacccggtgaaaactcagcccagaagaacatgtctacaacagccgctgccctcaggactgtgccaaccaacgctgctctagtgagtgaaggcgggagactcagaaacaccaacaggcacttatcctttgtagcaatactgtgatcactctcatggaggactcaaggggaggaactgctggggaagtgctgacagctcttagatctgtggttccccaaccttgaccatacctcagaatcactccaagagctcattaacaacaacatggccaggtatggtggctcatgcccataatcccagcactttggaaggccaaggtggtcagatcacctgagctcaggagcttgagaccagcctgggcagtacagtgaaaccccatctctactaaaaatacaaaaattagctgggcgtggtggtgagcacctgtagtcccagctactcaggaagctgaagcacaagaattgcttgaacccaggaggtggaggttgcagtgaaccaagatcatgccactacactccagcctgggtgacagggagagactgtctcaaaacacacacacacacacacacacacacacacacacacacaccagcaagaacaacaaaagcagggagagactgtctcaaaacacacacacacacacccccaagcaagtacaacaaaagcaaaagccagattcctgggtctcaccctacacctattgcattagaatcccggggttgggcctagaatttatttttttaacttctcaagtgattgtgatgcagaaaagccatatagcagtgtccagcaattgttcatcaactattggctggaaggactagaaatacctactccatctgactccaattagattagcaacagtcaagtaaaaagctgaaaagcctccaaaataactcaaattacactacctttttggtgttttaacaaatctcaccactgaaaagctcattcttttaacttcactaaatcctcctcttttagttacagcctcattttctttgatttggtccttagtgagccctggaaacagatcatctgttagaataggtgattatagcggaaaatggaaatgcagcgtaacaaaagaaaaacaaatcgctcctgtgcggccagccatgaagcccaagttgggtcaccctgggtggcagctggatacaacagactcagcaggcaccctgcccaaggtccactcgggtctacacctctcatcacatagcccactgttctgtgcaggatcctcctgttctttgtgaacatgtttcctggtgaagaaaagtcaaatgctacccagagatattttcaggtggcatttcctgttgtgattaaacagaattatgaaatctcaatgttttcaattcactggacttcttctagactttgtgactctatctgtgataagattctgcctggccaaagatattcactaatgctttgacccctcaatggcatggagttactgattccctaagaattatattgctatttagtcacaaaaatgttaaaatccttttcctatcatggtggttttaaaacatggcccctaattctttgacaatcctttcatcatctggaaatgggattctccatattgtgaacgtactaaaatccactgaattgtacacttacaatagtcaatttaggttatataatttttacctccatttttttttttttgagacagagtctcgctctgtccctgaggctggagtgcagtggcacaatctcggctcaccgcaagctccgcctcccgggttcatgccattctcctgcctcagcctctcgaatagctgggactacaggcgcccaccaccacgcccggcgaattttttgtatttttagtagagatggggtttcaccatcttagccaggatggtctcaatctcctgacctcatgatccacccgccttggcctcccaaagtgctgggattacaggcgtgagccactgcgcccagccacctcaattttttttttctaagtgacattctatatctccttcctttgaatctgggctccatgactgcttgacctgtagaatatggcagacacgatgctgtgatttctgagcctaagccttaagaaactggcagctgcttccatttcccatcttctaggatgcttactcttggcaaccagccaccataacatgaagaagtataagcaatccttccataggtcacccagggatgaactgaggtcctggggccagaacccccagctgagctcctagctgacagcaagcaccaacttaccagccacgtgagtgagccaccttaaaagcagatcctccggccccgtgcagatccacttcaaccaaagctgtgtggaacgaagacaagctacacccttgccaagcccagcctcaatcacagactcataagcaaaataaatgcctggagatgtttaaaccatcactaaattctatgatggtctgttatgaggcaaaaggtaactggcgcttctatataatcaagagtggctggtaaaaaacagcttcagaaaatcctctaacctggtacccatatatcacagtagattctggcaagcataatcttgagcaccgaagacttcatccatacatgttcttcacaactcaactgaatcacaaactttctaacgtgttcacaccgtatcatgtcactcaaaaccatgctacagactgaaaaagaaggcaactgactttcttgttaagaaattttaaaaggaaaaaaggagtaaaaagcaagaaagctacagagcataaaatcttggaggcattcaaataaaaattatggacagctgtcaatgtgccttcttagaaaagataatgtgcggtgacatctccccactaccctcctaccctgtcgaagcgtcagggagcctgggctcaactcctcacctccagcctctctggcaggggctcattctgcaggatcctcaacgctttggcagcagcatcgtgtttcgcagcctgtcttgtctttcctttgccattaaattgctgtcctcccacagaaagttccacttgataaagtaaaggtggaactggaaatgggtaaaagtacctagaaataaaaggaggttaggcaaattacagtctcaagttgataagtcacctatacactctctggcaaatgcaagtatttccttcatcacgatcctactcacattagtgtttgatgctaatcactcttcatcaatatatccagagatttcataaaagcttaaactggattagaattgctacacagtataagcaaagagtgtttagcaatccaaacttacatctcacaaaatacaatggcttataaattatgagtttatcacactaacctgcactgacaaaatctaaaatgaattaggctttggctgagacaaaaacttggcttgctctgccttctcaaaccttagctttaaatttgcatgtctccaataggaggctgggaattttaatgcacaagtctttcaaaaggaccctcatttcaagaaatcccaataagctgtagcctacctagcagaacccagtttcttatccatttccctagcagaacccagtttcttatccatttcatagcttatatttttaaaatgactatcccccaacagagagcagggaaatgaagaattccattttgctcatcatctatccactaatgtcttttttttttttttttttttgtgagatggagtttctcttgttgcccaggctggagtgcagtggtgcgatctcggctcactgcaacctccgcttcctgggttcaagcgattctcctgcctcagcctcccgagtagctgggattacaggcacctgccaccatgcctgtatttttagtatttttagtagagacagggtttcaccatgttggccaggctggtctcaaactcctgacctcatgatccgcctgccttggcctcccaaagagctgggattacaggcgtgagccaccacacctggcctccactaatgtcttattactgccagcagaagatttttaatccatggcattttcaggtttcaattaatattttattgcaccaaagctatttacaaaacgcacaagttcaaaagtcaaaaagtacccaataatcaggtaatctacaaatgctgggaatcattgtcttgcaggaatcatgatgctatgggaatcatgtttaaatatgattcagttacacaaagcagttacaagggttatctttagccaggctgcttgagggcacaagccacactgccagcaagaaatatgctcaggccctacccaagagcagtagttaaagaagcacaaaggagccgggcgtggtggctcatgcctgtaatcccagcactttgggaggccgaggtgggcggatcatgaggtcaggagattgagactatcctggctaacaaggtgaaaccccgtctctactaaaaatacaaaaaattagccgggtgtggtggcaggcgcctgtagtcccagctacttgggaggctgaggcaggagaatagcatgaacccgggaggcagagcttgcagtgagccgagatcatgccactgcactccagcctgggcaacagagcgagactccgtctcagaaaaaaaaaaaaaaaaagaagcacaaagggccgggtgtggtggctcacactttaatcctagcactgcgggaggccaagacaggaggactccttgagcccagaagttcaagaccagtctgggcaacatacggagaccctgtctcaatgaattaaaaaaaaaaaaaagaggcgcagccaggtgtggtggctcacgcctgtaatcccagcactttgggaggccaaggtgggcagatcatctgaggtccggagttcaagaccaccccagccaacatggcaaaaccccgtctctactaaaaaatacaaaaaaaaatcagccaggcgtggtggcaggtgcctgtaatcccagctattcgggaggctgagacagcctcctcacttgaacccaggaggcagaggatacagtgagccgagactgcaccactgcactccagcctgggtgacagagcaagactctgtctcaaaaaaaaaaaaaaaaaaaaaaaaaaaaaaaagaaagaaagaaaaaaaagaaaaggcgggggaggggcacaaaggcacaagagtaattaagaccaacttcaacacttggcaggcccaaaccaaatcattactccctccacaatctagaggtactggtttatgtaaaagatcagacacgttttctcctgtattttacaaaaaaaaaaaaaaaaaaacacatacctcgggggataagcacctcctctcatgttgtagttataggtggactgcatccgagagtaagggtcaacaggcttatacattggtttttttccaagtttcatgcacagtgcatttagttctacagtaggggttatgctttctgcaagaaagaatcgacaaagaactgtttttttctggtatgagaatgatactcactaaaataaaatgtaatagcatgctttctgctaattggattcatgatactttacataaaaggacctgggtggctcactgctaggcatcagacaaggaaatccaagaatatgctgtgatttctagatatttatacacagtcgacagcacaaaatctactctgagggttaccagaggagccacaatttaacccaagacattatcagtgaaagctatatggtacagctgtcagaaataagttccaaaacacatcaaatttcacgattaaaaaatcccatgtaaatgtccaaattgttttactgtttgagaatacttaatcaatataaccttggttgtactgatttacaggattattggcttgcactcagaagtatgtccgtacacagtattgaacgatgcatttattacattactaactggatgcaaagcactgtgctaagcttaagaaacacaattcctggccaggcgtggtggctcacgcctgtaatcccagcactttgggaggccaaggcaggaggatcacaaggtcagggtatcgagaccatcttggctaacatggtgaaaccctatctctactaaaaaatacaaaaaattagccaggcatggtggcgggtgcctgcagtcccagctactcaggaggctgaggcagaagaatggtgtgaacctgggaggcggaccttgcagtgagggtggctcacacctgtaatcccagcactttggaaggccgaggcgggtggatcacctgaggtcaggagttcgagaccagcctggctaacacggtgaaaccccgtttctactaaaaatacaaaaaattagccaggcatggtggcgcatgcctgtaatcccatctactcaggaggctgaggcaggagaatcgcctgaacccaggaagcagaggttgcagtgagtcgagattgcgtcactgtactccagatgaggaaacaagagcaaaactctgtcttaaaaaaaaaaaagaaacacaattcctgccccagaggagttcaaaaaacacaaagcacactcaaagagttacaatacaacatgatgtgcaacttaaaggtgaaaaatcagtgaggaggtggcaacccaattctcttcacagaagtcacacaaggcccacaaaatattcaggtatttccattcttgacatttctaatgaatttgacctgtggtcatacttgctacgaaaatgagttccattttcatacacaacaagttatctcaaaattatcaacttcagaaaatacatgctattcattttccaatttttttttctttcagttcatccaatccataaacctttaaaaaccatttaaaaagaaaaccagcctggaaagattagtgtcagtgcacaatatttaaaaacaacactttcatatcaaaaacagaacactagaaatggcaaaatctaaatgcacataaaaatccactttaaaatgcctctttaggatgtatatagagagaaataaaaaagacctgattctgtactataactggttcaactaaatttaatgcatgaatcaaatctataagaatatctttggggtttgcacagagggccacatgaattacagatctctctcttccttgcattagaattatattttttacaaaattcatataattgcattttaagtacagtctgaatcattttaagagcagctctgatccacagaatttgtctgcaatagagaataaacatgaagaaagtatactgcaaagaaatcaaaagtaacaagaaagatgtgactggtaacttcccagattccttcctacatacgaagacctgggatgacttcatgcatgtgagggggtctctgctaaaacagccattaatgacacagcctccaggtcactgatccccaacccttcaccagccatgccttcttgattagtatgctccctgaatgggctccttgtctgaggagatactacctgctggcttgtatttaagtaatatttacatttttctcattctttttaataactaagagacatacaactggcaataagcacttctgaccaacaaaattacaatcaatattaccacactgacttgatgtgactctaaattaaacttatattcttgctaatctatacactcttatcaaaaatatattttcattaaacttcggaaatctttgaaattatctggtcacccgccatccttcctatgaccgcctttccagattgtcaggcgttaaggcatcatagattggaaaccactgctttacaatgaggttaaggattcctaaaaaataagcatttgtcactggtagtgtagaatctgtgctttcaaaatcaacaagttaagaaaccattcatatacatactacatggtacctctagacacacttttgaaaggtacctgtttggcccatgcataagacctggattccttccttcgctaccaaaagggctgactatgggcttaggaaattttgttccctccaaagctttagcagcagctgtgtgtttgacctttttaataccagttcactcagctccccattgctgatttccaagtgtcagcagtactgtaaattcctagaaatgaaaagtgtgagctctcaaattcatgaaacctgacattgactgtaatatgtcacttgaaccttgaacactttctatggtcatggtttaagaggcctggtcttatcttgataattcatcctgtcatccccttcttatccttttttgttgttttttataaacaacaacaaaaaaaagagattgtgtgtgtatgcactgaaatttttttttttttttaagagacacagtctcactctgtccccaggttagagtgcagtggtgtgatcttggctcaatgcaacctccacctcctgggttcaagaaattctcctgcctcagtctcccgagtagctgggattacaggcacctgccaccatgcccggctaatttctgtacttttagtagagacagggtttcaccatgttggccaggctggtctcgaactcctgacctcaagtgatccacctgcctcagtctcccaaagtgctgggattacaggcatgacccaccacgtccagcctcaaaattctcttccaattacttctcatgaaagatattttgcaaacttgatttaaacacacagcagtacttcacacaaattaagacaatgtttgttttgatgctgcaatgtgtttgtgggctcttgtttgaaaacataaccaccctttttttcagtttttgaaatggggtcttgctctgctgtccaggctggagctcaaatggcacaatcatagctcactgcagcctcctgggttgaaataatcctcccacctcaacctcctgagtagctgggactacaggcacacaccaccatacttggctaattttttttttttatttttttgagacagtcttgctctgtcgccaggctggagtgtagtggcatgatctcagctcactgcaacctccgcctcccaggttcaagcgattctcctgcctcagcctcctgagtagctgggactacaggcatgcaccaccacgcccagctaatttttgaatttttagtagggatggggtttcaccatgttggccaggatggtcttggtctcttgaccttgtgaactgcccgccttggactctcaaagtgctgggattacaggcgtgagccaccatgcccggcccatacctgggtaattttttaatttttgcggaggcagggtctccctatgttgcctaggctggtcttaaactcctgggctccagtgatcctctcgcctcagccttccaaagtgataggatttaaggcatgagcgtttctatttttattaagttctcaaagtaattctgatgcaccccaaagatttgagattcactactttggaatttaacaaatcaattgaagcggccgggtgtggtggctcacaactgtaatcccagcactttgggaggcagaggcgggcagatcacctgaggtcaggagttcaagacccgcctggccaacatggtgagaccctgcctctactaaaaatacaaaaattagccacgtgtggtagtacgtgtctgtaatcccagctactcaggaggctgaggcaagagaatcacttgaacccgggaggttgcggttgcagtgagccgagaacacgctatggcactccagcctgggtgatgacagagtaaaactccgtctcaaaaaaagaaaaaattaattgaagcttttattcttctgatgtaatcactgaatatcactttatctcacttacaaataatttacaagggaaacctggatttcagtatgtctaggtcatttaaatttggtgccttaaggggtgaggcaacttgccttcatagctgatttttcttgtaggtcttacttttaggattccctcagtgcacggcttccactaaaggaaaaaaacaaagaatcctttattggccaggtgcagtggctcatgcctgtaatcctagcactttgggaggccaaggcaggcagatcacttgaggtcaggagttcgagaccagcctggcctacatagtgaaaccccatctctactaaaaatgcaaaaattagccaggcgtggtggcatgcacctgtaattccagctacttgggtagctgaggcaggagaatcacttgaacccgggaggcagaggttgcagtgagccaagattgcaccactgcactccagtatgggcaacagagactccatttcaaaataaaaaaaagccgggcgcggtggctcatgcctgtaatcccagcagatcgcgccactgcactccagcctgggccacagaatgagactccatctcaaaaataaataaataaataaataaataatcctttaccccccttgacacttcacacatcaggacatcaggggtctcctttattatatgttctgcagtccatcaggctactcatttaagtacaaacaacagcatgaactcaaaaccctggcaggcaggaaggtcaaatggcagaagcctgcaacgcagtacaatccctgggtcatcttggtgattgtctcatggataaatgctgaaggggaaaaagctaaaaaaaaaaaaacacacaaagttattctcgtgaaccgtcttgcctttctctaggactttccccatccggtgctacctgccactctgctgcattctgttggtgtagcaaggctagaatcttggttttgatagaaccaaaagtataccacatctcttgatttttcaaataatctaaatcacccaagagagaacaacttctcctctttgaacaacttgtgggtaaaaagaaaatatgcggttagagatgaacacacagccaaactacctaaattattaaaagttcaagtgagaaagtgcattagccaaaatataataaaaagttaataaagggaatcccgaagttaaggtctgcaaaaaaatcctggagaggaaatacaacagttatagaaaaatgactgacttctatttttattttaattaattattttttgataaagggtctcactctgtcacccaggctggaatgcagtggtgccatctcagctcatcacagcccccacctcccaggttcaggtgattctcctgcctcagcctcctgagtagctgggactacaggtgcgcaccaccacatccagctaatttttgtgtttcttggtagatacagggtttcaccatgttggccagtctggtctcaaactcctgacctcaagtgatctgtcggccttggccttccaaagtgctgtgaatacaagcatgagccactgctcccagtccctagttgcctaaatgtgtctataaagacacatttcaaatagaattatgttttaaaacaacatttttaagctagttttgtgtgagtggtaaatactgtttttcttaaatgcttaattaaatgcttaatcctgcctcagctacccaagtagccagaattacagctaccatttctcaagcatttactaggcattgtgctccacaggttaacatatatgctctcatttaattctcacaataaacctatttggtgggtattatccctgttttacacatgaggaaacaacgacaacaaaaaagtagtaacttgcacaagatcacacagctagtaacaagctgagactcaaacctagatgtgtctgacttcaaaggcaactgaaccgtattatgctacggtgactattcatgtttgtgccttatgttactttcagtcaaatgaaaagaaacacttgattttattcaaggcttgaggtttgcgtgtgaaggaaaatgaggcaaaatgagataaataactcatccttaattatattatctttgctgcaaggttaggatcagaaacagacagcgtcaattccttatctctcatactatatcatcttacgctacagctgcaaaagacaactccgtatctccgtgtccttagatggttgggaaaaaagttaactccagatatgcaagaattaagttccagaatgtgctgttaatacagataacaaacaagtttcaaagactgaattatttttttcctttccatgttctaaaaagactgaattcttgaataatgattagcaaattttaaaattatagtcagactttcattctctaagataaggggaatgacaaggataactgaaaccaaagacaatacaaaatactcactttgagactacatggtgaaaccccgtctctactaaaatgcaaaattagccaggcaattgcatcttcaaaccttttgcccagattgctaacaagtgaaaaaactgttttcccatcacctcttctccctgccctaaggtccttgtgcaaacaagcaggagaggagccagaagtaagctgcagacaagaggtggcccaaagctggaaaacttacgggcaatcaatcacaggtgcttgagaattgtctctgttcagaatcccaaacaaccatacactatttggagttttaaaagcaaaatatggccaggcggggtggctaacacctgtaatcccagcattttgggaggccaaggcaggcagattgtttgagcccagcaactcaaaacaagcctgggcaacatagtgagacttcatctccacaaagaattaaaaaaaaaaaaaactagctgggcgtggtggcatgcacctgaggtcccagctactcaggaggccaaggtgggaggattgcttaagcctgggaggtcgaggctgcagtgagacatgatcacaccactcactccagcctaggcggcaaagaaagactctaaaaaaactaaaacccaaatattccaaaaagcaacacatattttctttgacccattggcaaggatgaaaaaagaagcaacttcaaaaatctataatcttgtctaagtatagtttttgtttaagacaacctcatcagtttgaaaacatgtattttgaattacagcaccactttcaagagtataaaaaatagagaacattccaggtgggttataaatgcacaagcagtatggacaatatttaccttacagtgagctggaccttgctcacacaaaagcctatactcaagctggatcttgctgaaacaaactaactcattcacaagacacaactgggatttttctctatggggttcgccacatgagaaggaagtgaaaacgttaagagcactgaagtcaactagcagtatataagactactattctcctagggatatgaaaatagaggaaaaacaaatggaaggtctacaaatgtaggcagccatgatacaaaactgcaaatcattccaggagtacactcccagagaagacgcaactagggtcttttctgaaccagttgaagccaggtaatctaggagagggtgtgtcttcaaaagagagtgaagtcaggggagtaactaacccatggcaggcaagcaagatttgaaatcagatgaatcactgctattaaaaccaactggaatacaaggtcttctgagcagacactggttactgaaacagccgccagctgtaccccgcccattatttcgctaaactcaacatgccactaccatctctcaaacaacacttgtcatcttccatacagtgaaactctcattcctgggcatcctctagtcttttctccaaaggctgccatcctcagaccttatctatttctaacaattatataaataaaataaaatgatgttggtgggcaggagttttacaaagtcaataggatttggacaccagaattcattagaagaaaaagcaataaatcccagaggacggaaacagtctgtgccttttccttttaagagagtctcacatggcaaatatggggaaaataacatctctccaggactacaaaaaatcaagaatgctatctggtgaaccagtccaaggaattgtgggggtggcatggaagatgccacgcagctgagtgggagaagcaaacactctaagaacagatttataggccagacatggtggctcacgcctgtaatcccaacactttgggaggccgaggcaggcggatcacgaggtcagaagatcaaaaccatcctggctaacaaggtgaaaccccatctctactaaaaataccaaaaaaattagccgggcatggtggcgggcgcctgtagtcccagctactcaggagactgaggcaggagaatggcgtgaacccgggaggcagagcttgcagtgagccgagaccatgccactgcactccagcctgggcgacagagcgagactccgtctcaaaaaaaaaaaaaacagatttataaagtaaaggaaatgagaagacaaaggaggaaactgaaaggaaacaggcacaaggaaggggatgaaaagactttgttataaggtaactctggtatagaaatacccacatactaggctggatgtggtggctcacgcctataatcccagcactttaggaggccaaggtaggcggatcacgaggtcaagagattgaaaccatcctggccaacatggtgaaaccccatctctactaaaaatacaaaaattagctgggcatggtggcgtgtgcctatagtcccagctactcaggaggctgaggcaggagaattgcttgaacccgggaggaggaagttgcagtgagccaagattgtgccactgcactctagcccggcgacagagcgagactccatttcaaaaaaaaaaaaaaattgacactgacaccccatttatttcactggtcttgccatgttgcagggagggtgttgggaagcagaatattgtttttatttattatccccactccctttttttttctagtcagaccctgtctcctattcataagaatattggttttaggttttctttctttagccttagtttcttgtctataatatttttaggtatttttcaagtgtttaaaccttttttttttttttttttttttttgagatggaatctcgctctgttgcccagactggagtgcggtgacatgatcttggcttgctgcagcctctgcctcccaggttcaagcgattttcctgcctcaccctcccaagtagctgggaatataggcacacaccgctacacctggctaatttttgtatttttaatagagacagggtttcaccatgttggccaggctggtctcaaactccagacctcaggtgatccacctgccttggcctcccaagtgctgggattatgggcatgagccactgcaaccggcaaggtacctttagttcattttcctaattatcagatttgaatgtttctatactttttgttttgagtcagtctcagtctgttgcccaggctggagtaagacagcacgatcacagttcattgcagcctcaaacttctgggctcaagcaatcctcctgcctcagcctcccaagtagctgggacaacaggtgcacaccatcaagcccagctaatttttaaattggcctcgcagcctggcacaatgactcacacctgtaattccagcaatttgggaggccaaggcaagctgatcacttgagatcaggagttggagatgagcctgggcaacacagtgaaaccccatctctactaaaaatacaaaacagccgagcgtagtggcaggcacctgtaatcccagctactcgggaggctgaggcaggagaatcgcttgaacccaggagccagaggttgcagtgagccaagatcacaccactgcactccagcctaagcaacaaagtgagactctgtctcataaataaataaataggcatcccaaaacactgaaattacaggtgtgaaccaccttgccagccaagaaggagactttttttcttttgagacagggtctcgctctgtctcccaggctggatggaatacagtggtataattacagctcatggcagcctcgacctcctggactcaagtgaccctcctgcctcagcctctggagtagctgggaccacagctcagccaatttttgtatttttttttttgtatagatgggatttcaccatgttgcccaggctggtctccaactcctgggctcaagcaatctccccactcggcctcccaaagtactgggattacaggtgtgaaccaccacgcctggccatgacgcagaaaattttaacaagaaaataaatttgggcattgtagctcacacctataatccagctattcaggaggctgaggcaggaggatccacttgagcccaggaggttgatgctgcagtgaaccataatctcacactaccgtactccagcctaggcaatagagaccccgtgaaacaaacgagagataagaaaggaaagaagagaaaaaaaactctgcttctttattccatttctaattgatcctcattatgatttctaaactacttctggaaccttccagacttaaacttacttgttcaaaacaaaaataaaaataaataaatgtcaatgtacttttttgctttctagtaaatctggctgcccccttgcttgggataaaatcttacggacattcaaaaagaaggcttatgtagatttaagagctcttcgtcagttgtgggaattttatttatttattttttatttatttttgagacggagtcttgccttgttgcccaggctggagtgcagtgccatgatctcagctcactacaacctctgcctcctgggttcaagtgattcttctatatcagcctcccgaatagctgggactacaggcacgcaccaccatgcccagctattttttgtatttttagtagagacggagtctcaccatattggccaggctggtctcgaactcatgacctcgtgatctgcccgccttggcctcccaaagtgctgggattacaggcgtgagccaccgcgcccggcctattttttctttttttgagacagtgtctccctcttgcccaggctggagtgaagtggcacagtctcagctcactgcaacctccacctccagggttcaggcaattatcctgcctcagcctcctgagtagctgttatgggcgtgcatcaccaagcccagctagtttgtgtattttttgtagaggcagggtttcaccatgttggccaggctggtctcaaactcctgacctctgctgatccacctgcctcaacctcccaaagtgctgggattacaggcgtgagccacggcacctggcttgttctgggaaataattttaaatgcagaattatcccatacaacgatgaatatccaaggtggtatttactgctcaattctttctgccagccaccgctctttaacagatgaggctttatagtgtgagtagttttcagctttcaattctctttctcacaacctacaatcgtctgtcaactgaggcccctgtcaaccccttacacaaccagtgttctatatctgggataaagaagtgtgggtggtgatactttcttttgctttttgaaggtaaatgtgagagctccctaaatctgcaacctatcagatcagaaaacagggtaagaaaacatttgaaatagaagacacttggattcatatgcttacctgcagctgcactggtggatgtaatagatgcagagggtaaagcagagttttgaatgggtctacctgcattttcagagggcagagagctagtagtagaaggaatactcatcaaaggctgtgagagaagagactggttcttgttcagtatttggctccctgagagagcagcagatgggttctgaacttgcacttgaacttgagacatggtcactttcaacaaaagtgaacaaatgcaggtaaacagctttcagtgcaggttaattcagtgctatgaagtctaaagttctacctaaaagttgtaagggaaagaaaataaaaaggtaaattatagaggagatatgtaattgccaatattcagtcaaaatggtgtcacctactgacttatgaaaatagctccatttagcatgtagctatgttgatttattcgaaatatgtttctccttggtatacagtaagtttcttggccttgtgactttcccacagtgttttttaagtgatttacaatacctgtgtgctctgcatattcattatacaaagagaatcagtagggtataatatttattggtgagtattaagaattgcaaactatagcttacattcaaaaatgcaaatttgaaagtatggagaggtttccatagtaattggggcacagtaaggtttctttctggtctcaaaattacaagaaactgaaagcaaactaggtttatcataccaggaacaggtgaatgtgaacactgcttcctcttaaggaccaaggctcagactgacaaccttagggccttaagttgacagaaggaaggtaggatacttctgctgtttctttttctttatggtgatgagagatgtattgttttcctaaaaggcttgtttgaggtctcatttaattatagaacccaaacaaggaaactatcacaaccctacccaggctcacagatcctgagaagtgatgtgagtaacaaagaccatactagagaatttatactattaaaagcaaaagtggagatgaagaagacaggaatggattttagactggcaattttactggtgtggttgggtgggggagcactggagcttgtttacttcatattgtaaattaagagaataatgaaggcattacttctaaatacattaaatttcttcacgagacaaaaataaggacagttgtgttcattttcatggccatcctttaaaagctgaaaatgtttttaatgagtcaaagtacttaaaaataaccagtggcaacaaagaacagaaatgacaggtctctcaggaaatagccaaccaatgcagaaaccagcaaaccaactaattagaagttctattataaagaaacagttactttaattttttttaagtatcaaaatgatttttaaagctggtcctcaagaaagagatgaatgaccagagcaattaagctacttgaggagtcctaacacattctctcttactgagagcaaaaaggactgcaaaactcaaaagaaactcaagcgaaatgtgactctggatagcagaggcataagtattaccttattcaacaaaattccccaagagtgcagttgttcctttttactttcagaatcagaacaaaataacagaggcgttccattgaagatctacataatggtcttagaagacaagtcgccagtgtcaagaaacaagtccagaaccattcagaagtcagctatgaccttatttcattgggttttttttccgtcagctgctaaaatagaaacacttttttcctcctctcttcccctctcttcatttattcactcactcctccttttcctgctttttgtaaactatcttgagagcactttttaaaacaaaaaagtcacttgtgtatgtacgacttcacaacaccaaccacaggtctcaaggtcaaaaaatgagctaggagtaaagtatctgctccagaatctacccccatcccagaaagagcaacccaactgtgtcctgagtggctcttagagtttaagactctgaatgaatgcctaaatttagaaagggtgtggaccaagggatttttggttaatgttctctaaagcaggctgactgccaggatttcaagtcagtgataaatttttaattttttttttttttttccgagacagagctttgtcgcccaggctggagtgcagtgttgcaaacttagctcactgcaacctctgcctcctgggctcaagcaattttcctgcctcagtctcccaagtagctaggattacaggcatgagccaccatgcctggctagtttttgtatttttagcagagacagcatttcgccaggttggccaggctgctctcaaactcctgacctcaggtgatctgcccacttcagcctcccaaagtcctgggattacaagtgtgaggcaccgcactctgctcaagtcagtcataaatatgtaagttttctagaagctgagaaaggaataggctttttaaattaagactgcctcaaaaatgttacccttaaattcacttaaaggacttaacatctaacagttggttgaaatatgtagttcaaaacaaaacaaaccaaaaaaaaaaagttaaactctccaaataagactaggtaaatttaaatttccaacatgataaatatgaaaatgcaacaaacaatactcacaaattattagtcacctgctagtttaaaatttttatgtgtcttatttaagcctgaacagagcatctaaggtagtgattctcaaaagggagcaattttgttcccccaggagacatctgccaatgtctggagacattttttggttgtcacaaccagtgtgcagaatggggaacctactgatatttagtggatagaggagccagggatactgttacaagcacacatatactaacccacacaatacaatcttactaatgtaacaagtagcttatattcttagacaggaaaagaaaatcccctttctatctcgaaaggccctaaaaaatagatgctaattttttttttttttttgagacagtctcgctctgttgcctagggtggagtgcagtggtgtgatctccgctcactgcaaactccgccttctgggttcaagcgattttcctgccttagtctcccgagtacttaggattacaggcgtgtaccaccacacccggctaattttgtatttttagtagagacagcgtttcaccatgctggccaggctgatcttgaactcctgatctcaagtgatcctcctgcctcagcctccctaagtgctaggattacaggcatgagccactgcgcctggcctgatgctaatgttttagcacccaaacagatgctcctctcccaaagagaagccggaacagacatcacagtgatgaatgggggaaaatatatcatttgcccacataactcaaggaacaaattaagtttttcattactgatatagatatagttcatagcagccttcaaggaactgtggaactttggaaatagaacttctgtgtaaattctaaacctgttgctcaacagtactgtcctgaagactaagtccttaaatgcaaataagtcttttcctttaaacctgtctttaaggattgttttccaccaggtaaattaaggacttgagagatcaaaatgttttgttagagtcttcttagagacaaacactattttatacacagtaaaattaggttgagaagtttgaaacgcaaagattcttcagatctcgctggtgctggaaaacacctcttactgtgaattgtgttgtgctgccattttcctgcctttctgcctcccacacagatgaggacctttcatctcctggttctttccctatttgaagggctttagacaccagatcaacaaaacatactcatcttaggctcaagccctaattttacatagcatacataagcaccataatacaagctgcaaaatgatagagttataggtgtttcttttaaaagattccttaattccatgtcctcctggttcttaagattggcttggtaacacaaaaatcttctcataaaaacagaatcttgctttggctggcagttaccgttttacaagtgccaaatagtttctatgggttgtggtgaaggagaatctgggcacatgagcgctacgaaagttttttttaaattatacatgatgtactaaaaagtggtcacaaaatgtgtattcagcactcagcagtgaacctaccaagactagaccatactgagcacagtccgagtgatttaatatacaagaaggcagacccttctagaaatggtttacagaactatctgcaatcgtgcttagtcttttaattatcttgtgctactaatacatggttagtcttatccactttcaacttacagactgttaaatctttgtactatgaaatacttaagcaattatggaaaaacattttttttctggagacagtctcactctgtcgtccaggttggagtgcagtggcacgatcttggctcaccgtaacctctgcctcccaggttcaagtgattctcctgtgtcagcctcccgagtagcgggaactacaggtgtgtaccaccacacctggctaattattttgtgtttttagtagaaatggggtttcaccatgttggtcaggctggtctttaactcctggcctcaagtgatccgcctgtcttggcctcaacaaagtgctgggattatagacatgagccaccgtgcccagccagaaaaacatttttaataagtaatttttaaaccggattaacacaacttataatgcagtagctatacttttgtttaatcaacatatcagtctccttcataataagtgatatttccaaacaagatgtgtctgggaaaaaaaaaaaaaaaaagaaggaaagaagtcatcccaattctggagaagcctccttttcagatcatcacaaacatttcactaaatgtctccccttgcaagtcctttggtaaatctgatgtaagatggatatacagatacaaaggagcactcctgtgcctcgctgttataaagcaatagcaattctaaaatatattcactcaatagtctacaaaaacttattaagcatctattacatgtgaacccataaatggcagattgcacattcttaaatgctggaaaggatctgtgtgttaaactcttcctcaaagacacaagacgacatctttcagcaatcacatgtaaatctattattctgttctctttagtttgttgagaggctccactcccagagaaacttggtcaattaaaaaacatcaaggaataaaccactttttctacaaaataaagtccttttcaatagcctttaaatacacctaaaatacccacatcattccttataccagttatttatttatttatttttattgagacggagtctcgctctgttgcccaggctggagtgcagtggcacgatctcagctcactgcaagttccgcctgccaggttcacaccattctcctgcctcagcctctccaagtagctgggactacaggtgcccgccaccacgcccggctaattttttttttgtatttttagtagagacggggtttcaccgtggtctctatctcctgaccttgtgatccgcctgcctcggcctcccgaagtgctgggattacaagcgtgagccaccgcacccagcctataccagttatttctaagattcttttctgacacatctttcttgctgcaatatggttgaatgttttctgaaagtaaactcactctccaccattacttctccctcccagccccccaaaatagtaattcattgactccaaacattatccaaatacctgcaggcagggcagacgctagtacagaagcatgtcaatcactatcgtcttataggatcatttccaaaatgaccgctttaaggtcaatgtcaagcaaataatgtccaatagcaggcctatatatactaaatcacccaataataaaacgtttttgaaaagaaatatgaccaaactactttaaaaaaaaaaaaaaaaagaaacaaatcactaagtacctgatgctcaagacaaagacagagattagccctgaggaggcacactcacttgcaagacagtaaaattaaccaaaaataatgcctggaaacaacccaggctgttcaggatctttgcacttgcaatacaagtgagactgaatgtggtccctgtctcacacttggcccaatgccatgggcaatggaggactttctttccacacaaatgtaacagttgggaggtcagatggtctgcttaaagaaacacttcctaaaagagattttcattattttcatcctagaaaacccatcacaccatgctaaagtgaaaaacaatttacctctatagcctaaaaaactataagccttattttcttttctagttttaaaactttatcaagcttccgtctctccttctctaggagacattctcaaaaataacaaaattcaagcacatacatttgtaaacagtttttaatctaaacttatacaaacatagaaaacttttaacacaataaaaatgaatacctgttcatgatctgctggagacttttaaaagtagttctgtgtgatattttcttgactatgaaggggcttggttcaacataatggttaacaggcttttcctttcagaaaagggaaactgtaatctgtaaccatgtgccatctacctagaaacacgactgcatttaccaccatcttcatgcaaaacagaccagtgccaagactcagtttctaagaaaccacccttgctgctaagtagcaaccaacaatgttaaatcagatcaaacttctgagatgtagctttcaattccactcccagctcttggcaatccactcccctgtgcctcagtttccccaaaacactttataataggatatttgacaaagcctcacttgtagcaatcactgagtcaaaacactaaaggaatcctgaggcatgataatacattttttttttttttgagatggagtctcgctgtgttgcccaggctagagtgcagtgaaacaatctcggctcactgcaagctctgcctcccgggttcacgccattctcccgccccccaacacctggctaatgttttttgtatttttagtaaagacggggtttcaccgtgttagccaggagggtctcgatctcctgacctcttgatccgcccaccttggcctcccaaagtgctgggattacaggcgtgagccactgcgcccagccgataatacaattctttaaaaagaaaagcattaggccgggcacagtggctcacgcctgtaatcccaacactttgggaggccaaggtgggtggatcacctcatgtcaggagttcgagaccagcctgaccaacacggtgaaaccctgtctctactaaaaatacaaaattagccaggtgtggtggcacacgcctgtaatcccagctacttgggaggctgaggcaggagaactgcttgaacccaggaggccgaggtgagccaacatggcgccattgcactccaacctgggcaacaagagcgaaactccgtttcagaaagaaagaaaagaaaagcattatacaaatccagtgtggtgagtttaaaaccattcactgagctttgtacaacttcaataatttccttatgcttccatttcctcatcctcaaagtaggttaacttgtctactaattactacctcagagatatggtacagcaatgtgctttcagcttctagagggaaagtgttaaaagcaggaagcagtattaacccacatagtgtattttgcattgccctgacaaaagaccagaaaatcttgaacactcttagaaaactccttttttatctgaatgttcacaagctgctagtggtcaacgaagcttgattcgtaaccctatctcacaatagaaaacaatgctaaattcgttctatgagtttgaaaatcatgtttaacataaacaatctgagaaatcaaagggtttttttaaaaaaagcaaactacaaaagatactatgaccaagaagcttattgagccagtcatgtttaatgacagcttcagtcatcaattctcatgtctctatatttaaagaacataggctttacattcttgccaataacttttcctgtacttactttctaattaaatcaagagtaaagatgaaattcaaactgcataaaatttgtttctctaatattatagccagaagtaaaaatcattctccacacaactcattaaagaattcaaaagtaccactgattatcaacaggccagaaattataaagccaaattatatgtaccttttttaaaaagagggcgttccaggaacaatgttgtctttgttcagttctgagaggttaagtggttaataaactctggaaaataaaaaataataataatttagtagggtaggtcttttctctgaaactgaagacatactgctcaagttttggggaaacctataatttacaagtagggaagactgaaggcatgacgtcatggtttgaggcagcatgcagtagagtcttcaaaagacacaagcggccagacatggtggctcatggcctgtaatcccaacactttgggaggccgaggcgggcagaccacctgagacccggagttcaagaccagcctggccaacatgatgaaaccccatctctactaaaaatacaaaaattaggctgggcatggtggctcatgcctgtaatcccagcactttggaaggccgaggtgggaaattacgaggttaagagattgagactgccaggcatggtggcgcacgcctgtaatcccagcactttgggaggccgaggcgggtggatcacgaggtcaggagatcgagaccatcctggctaacacggtgaaactccgtctctactaaatgtacaaaaaattagccaggcgtgatggcgggggcctgtagtcccagctacttgggaggctgaggcagaatggtgtgaacccgggagacggagcttgcagtgagcagagatcgcaccactgcactccagcctgggtgacagagtgagactccgtcacaaaaaaaaaaaaaaaaagagattgagaccaccctggccaacatggggaaacccatctctactaaaaatacaaaaattagctgggcgtgatggcacacctgtagtcccagctacttggcaggctgaagcaggagaatcgcttgaacctgggaggtggaggttgcagtgactcaggatcgcgccactgcactccagcctggcaaaagagcgagactccgtctcaaagaaaataaataaataatacaaaaattagccaggcatggtggcgcaggcctgtaatcccagctacttgggaggctgtggcacaaaaatggcttgaatgcaggaggcagaggttgcagtgagccaagatcgcaccactgccctccagcctgggccacagagtgagactcctctgggaaaaaaaaaaaagacacaattgcctggaagctgggtgaagaatattttgcagagacacatttataagagacagcagaactttccttttccagtcccaattattccctgatgagagtaatatgaatatctcataatgtttaggctttgtttgttcaggtttttttttgagatggagtcttaccctgtcccccaggatggagtgcagtggcgtgatgtcggctccctgcaacctccgcctcccgggttcaagcaattctcctgcctcagactcctgagtagctggggttacaggtgcccgctaccacgcctggctaatttttttatttttatttttagtagaaatggcagggttttgccaagttgtccaggctggtctcgaacacctgacctcaggtgctccacccacctcagcctcccaaagtgctgggattacaggcatgagccaccacacccaacctcataatgccttttttttttttttttgagacggagtctcgctgtcgtccaggctggagtgcagtggcgcaatctcggctcactgcaagctccgcctccagggttcacgccattctcctgcctcagcctcccaagtagctgggactacaggcgcccgccacctcgcccggctaattttttgtatttttagtagagacggggtttcatcgtgttagccaggatggtctcgatctcctgacctcgtgatccgcccgcctcggcctcccaaagtgctgggattacaggcgtgagccaccgcgcccggcaataatgctttttaaaaggaactgtacattacatatcgtccgatcacataagactgattttcaaacctgtgttttctttccctttatacctaccactttattcgtaaatgtcgttggcatatgcttggtgacccaaatacaattttatggaaaattttaccaaaaggcattgggtacataaatagtggcatattaaattgcagaatatgaaaaaagcacattatctctaataagtccaaatcataatcatttttagaagtgaactttacattacagaatttgagtttaattctcaaattctgcggtctgatttatctagaggttcctcaacttaaatggtagttgtcagtagtaacacagaatttcttaccttgagatgcttttatacattcttacaacactaagtgtttttgcttgtttcagtttctcactgctactatggcttaacaggcaataaaaaattgctgttcattgtctgattgattccagaaataaatcatgagctctagtttattttctggtattttaacagctcaggttcttttcatagatagtatattatactaacaactttccagtctagagctcagttgttctaatatctcagctattcaaagactggcatgaatgggaactgaaaaaggcctctgagcagcccaaataccaaagaccttctaacatagcccatgccttttaccaataggggcctcacctgagccaagaagttttctatgttgaacaatttttgtaagtttgggtgtctagtttttgttttgtttccaaattccctatcccctattctgagaagcagggtgtctagtttttttttttttttttgagacagagtctcgctctgttgcccaggctggagtgcaatggcgtgatctccgctcactgcaacctccgcctcccgggttcaagcgattctcctgcctcagcctcccgagtagctgggattacaggtgcatgccaccatgcccggctaattttttgtatttttagtagagatgggtctcaccatgttagccaggctggtctcgatctcctgacctcgtgatccgcccacctcggcctcccaaagtgctgcgattacaggcgtgagccaccgcacctggcccagggtgttcagttttctagcccaaagcagaagtaaaaaataaaggccaggtgtgatggctcatgcttgtaaccccagcactttgggaggccgaggcaggtggatcgcttgagctcaggtgtttgagaccagcctgggcaacatggcaagaccctgtctctattaaaataaaatttaaaaatttaagggccgggcatgtggactcacgcctataatcccagcactttgggaggccgagggtggcagatcccgaagtcaggagatcgagaccatcctggctaacacagtgaaaccccgtctctactaaaaatacaaaataattagccaggcatggtggcgggcgcctgtagtctcagctactcgggaggctgaggcaggagactggcatgaattcaggaggcggagcttgcagtgagccgagatcacaccactgcactccagcctggatgacagagtgagactccgtctcaaaaacaaaaaaaaaattttaaaacacacataaaaaaagctaaatataagaacggaaaaaggagctgttagagtcagacataaagacaatgctaaaaaataaccatcatcaacttagcaaagaaagaagagagagagagaggggagaaatacagcagtcatttggatctcaaatacttttacacagtgatagctgagattcatacaaacattcatgttttggccaggtgtggtggctcacgcctgtaatcccaacactttgggaggccaagacagaactgcttgagcccaggagttcaaggccagcctaggaaacagaggaagaccccatctctccaaaaagtttaaaactagctaggcatgatggcatgcacctgtagtctcagctacttggaaggctgagatgggaggactgcttgagaccagaagattgaggctgcagtgagccctgagtgcaccactgcactccagcctaggcaatgaagcaagactccatctcaaaaaaccaacaaaaatgcacatttccatatgcaaatctattttttgaaatcctccaatttcaaaagataatccaaagccatcatgatcattatcaatatatctatatagtgcacacttaccactgcaattttccccagtcaagaatgcatactaaaccaggcaccgtggctcaggcctgtaatcccagcactttgggaggccaaggtgggccaatcacctgaagtcaggagtttgaggctaggctggccaacatggtgaaatcccatctctactaaaaatacaaaaattaggccggcgcagtgactcacacctgtaatcccaacactttgggaggccaaggcaggtggatcacctgagatcaggagttcaagatcagcctggctaacatggtgaaacactgtctctactaaaaataaaaaaaaattagtctggcatggtggcacatgcctgtaatcccagctacttgggaggctgaggctgaacaatcacttgaacccgggaggcagaggttgcagtgaactgagattgggtcactgcactccagcctgagtaacagagcgagactctgcttcaaaaataaaataaaataaaaatataaaaattagccaggcatggccgggcgcggtggctcacgcctgtaatcccagcactttgggaggccaaggcgagtggatcacaaggtcaggagatcaaaatcatcctggctaacacggtgaaacaccgtctccactaaaaaaaaaaaaaaaaaaacaactagctgggcatggtggcgggcacctgtagtcccagctactccagaggctgaggcaggacaatggcgtgaacccgggaggcagagcttgcagtgagtcaagatcgcgccactgcactccagcctgggcgatagagcaagactccatctaaaaaaaaaaaaaaaaaattagccaggcatggtggtacgcacctgtaatctcagcttatcgggaggctgaagtgggaaaatcgcttgaacctgggaggtggaggttgcagtgagccgagatcacgccactgcactccagcctgggcgacaagagcaaaactccacctcaaaaaaaaaaaaaagaagataaaaagtagcaaattatagaaagtcccttatgcaaaagaaagcttatttcacttttattcttttttatgtttggtgcttgaataaattctcaactaaaaggaaaattactatacagaagtagtcacttgctaaacattacaggttgcaaaggtttactcaatgacaaaccaaaaggaaacttatttgcctaactatatttgactgtcatctaggtaaagggtcatggagctttcatgagcaggttggttcaattgtgcaacaaggaaaataagcttccaagcataatgagacttattattacatataaattgttctttctgacagaggaaaggactgcctagcattctgcataaaatcacaatggcttcagcagacaatggccctatttgaatcagggtggaatctgcaagggtagaaaattcatgcctcagttaattgtaatctatagaaggcatggatttcaaaacagcaaagataggagagaatcagacaagatctagttagatcctaaagctcatctctgaagggagctaatatagtgacaatgtaagcagcattatctgctcacttcatgccaaggggtatttccaacacctattagtgattaatgagacatgctatgtcattacagactacagggtagcctcagttgaggttaaacacaaaatggaacttcagacaccatttcactaaaagctcacatccaaaggcagatttaatttcactgatccagcctttcaagactaaccataagagaagactgcccaggtggaataccaaagaagcttctgattcagatcaccgtttcaaacaaaagtaaaacaaaattgttcaggaagcagttcaattccaaacaggaagctgtactaaatactcccaacagtattagccacaagagggatgttagaaagggctaggaagcaaagaggacaaccagcacctatcctataaagttaattggaagcttagttaactcatttccactaaagcagaatgttagaattcagaagaaatgaatttttttttttagcaacaacctggactacagttctttttttttttttccccccctggatacagagtcttgctctgttgcccaggctgaagtgcagcggcacgatgtcaggtcactgcaaactccacctcccgggttcaagccattctcctgcctcagcccccggggtagctgggattacaggcacgtaccaccacacccagctaatttttgtatttttagtagagatggggtttcaccatgttggccaggctggtctcgaactcctgacctcaggtgatgcgcctgccttggcctcccaaagtgacggaattacaggcgtgggccaccatgccagcaatttttaacaaacctgatgacacacgatagcagtaatttaggagctggcctcctttaacacaaaggttaataagacagcccctccccacacacaaacctgtggatcagctttaagttttagcttaatttgacataacaaataaaagtaaactggaaagctatttcaagggtccatctaaaagactattacttaaccagactttctttcaaattgatctagggttctaatgagcaaaattcatcctagctgctgcggtggggagagtcaggggagggccaccagtgacaagcagaatcaattatcctaaacaaaaagcacctaagcataatttagagacaaagcatggttcagtggaaagaacactgactttggagccagaccagcctgtgctctagaactaatacttggtgcctcaggactctgagccagttatctggcccctcggaagcgcatcagcatcctcagcaattattatgagctttacgctgcaaagatgtttatgagtattagaaatacaacataaagggtctaagaaacccttttctttggttcaaggaaagagctaaatgaactgcaacttttatattattaggtaaattcaacctgaccttttaattccttttctgcataaaataactttcaccctgtaattctaacctggcacatggtaagagctcaatagcagtaaatattattatccagcaaattcactaaacctgtccttacacataaacatctataaaacttacagcaacactccacttgtaaaaaattttaaataggatcagagaatatgctgactaaaaccaacccactcactgagcaaccagttctgtagctacatcaagtataggggcaaggccgggaacagtggctcaagcctgtaatcctatcactttgcgaggctaaggcaggcggattgcctgagctcaggagttcgagaccagcctaggcaacatggcaaaaccccatctctgctaaaaatacaaaaaattagccgggcgtggtggtgctcaattgtagtctcagctactcgggaggctaaggcaggagaattgcttgaacccaggaggtggaggttgcagtgagccgagatgatacctctgcattccagcctgggcaacagagcaagactatctcaacaaaaaaaaaaaaaaaaaaaaaaaaaaaaaaagcagaggcaatctaatgaaggtttaaccctcagcaatcatgttcattcaggggaaaagaccccaatgtatttaaatagattttcttagcctttattgtctgggagacatgacacaaaatttctatcataataaaatggccagttttgcttccattactgttataaacccacatagtcatcacacttctttcccaaattagattccagattaaacagatgccagatgggttacagatttgatattcagaagactaatttttaatcgaaagcaaacactttctcaaatagatttttccacttttgcttccagtaaatatactttgagggagttccctgagtctacttctttaacaaataaacatatgtaatcccagaaaatatacagcaattaacagcctgcagaaatttttctctacttccatttatctggtgacataaatcactgttacatcaaccttattcaccagtatgggaatgtaaacacttaaaaaacaaattaagctatttgcagtaattcccattttaccactttaaaaatattacttttctctgcagtaaggttttctagttcagagcattaagctgtcaacaagacagatatccaagcccatccatcccgtggcatttgataagatcaacacagctatatatttataatcctattatctccttagcaggtgagaacaatggatttggccaacattattcaagcttcataatactgtatggtaaaatgttcatgacaaagagcagaaggtatgccgggcacagtggctcacgcctgtaatcccagcacttcgggaggccgaggtgggcggatcacaaggtcaggagatcgagaccattctagctaacacggtgaaaccccatctctactaaaaacacaaaaaaattagccaggcatggtggcgggcacctgtagtcccagctactcgagaggctgaggcaggagaatggcatgaacccaggaggtggagcttgcagtgagccgagatcacaccactgcactccagcctgggtaacagagccagactccgtctcaaaaaaaaaaaaaaaaatagtagacggtgttcagcaccatgaaacagggaggcaaaaatagaaagtagatggtatctaaagagatgtacaataaaacttcataaactttgttatatgtttgaaatttttcataataaaatggtgggggtaaataaccatagcaactaacatgtcctctcatagttcaactgataactggcaatttatattttttggaacagcacaaatggtatacagccttgactctggtgaagttttatttaaagaaaagctcatgtagaaaattacacgagaagcatttcaaccacaaatgtctccatcaccagaagtcaatgtaaaataacctgttataggtctagtgtgaaacaaatctgtcataaaattctctaaacatttttgaaagctctaaaatcccattctgagagaaaagcaactccaaagctcttatttgagaggggaggaatttatatttcctcaaattgaacaattctgtgtcactgggtatcacatcaaataagaagatccaatttagaggctcatgaaaacaaggcctctgcctataatcccagctactaaggaggctgaggtgggaagatgacttgagctcaggagttcaagaccagcctgggcgacaaactctgggattgacttgtggaatcccacaaaaagatacccttttcatgaaagtttcatctttatactgaattacactcttactcaatccagtaaaaaggctcaaagaaagttgccccacaaactgagactaccttgtggtattggggagagagactggatgaagcagtatccattttgataacacccagaatgatatcaatgatctggactttagaatggggatggaggagagttccatgagtcatggccatttctaaacttaaaatacagtaaatcctctcttaacataaggggtaggttcttggaaactgagacttccgactaacacacgcttattgatacaaacaagagttaggttctagggcatatttctcatcagaaaaatatcaccaaacttttaaataaagaccaaacacttcgaatattaaacactgaaataaatgtgaagtatacatgccttttttttttttttgagaagtacttttgctcttgttgccccggctggagtgcaatggcacgataaccgctcactgcaacctctgcttcccaggttcaagcaactctcctgcctcagcctcctgagtagctgggattacaggtgcccgccacccagcccggctaattttttttatttttagtagagacagggtttcgccatgctggccaggctggtctccaactcctgacctcaggtgatctgcccacctcagcctccaaaagtgctgggattacaggcatggggttgcagtaagccgagactgcaccattgcactgcagcctgggtgacaagagctaaactccatctcaaaaaaaaaaatttttttttttaccacttattccagttcagggttggggtggctggagcctatctcagcagcttagggtgcaaggccggaaccagtcctggacaggacatccactgcagaaagcactcacacttacacacacagctccacacaccagtgaacctcacgtgcacagctttgggatgtgggaggaaatcaagagtacccagagaaaacccatgcagggatagggagaacgtgtaaactccacagacagttttttttctcaacattatcttgaaacaacattattcaaggacctgctgtaatctgtatatacatggactttctggctgaaacctaaaagagagcaacttattctcaagaaactatatttatggtaacaattctcaatgcttaaaagttttacgttaagcttaatgggaagcactacacatttttaaaaatgtgttgtgtcctttcccagatactaaattggcgtttctttcctaaatcaattttaagaggtgtatctttccccatcttccaggtagtcataactaaaacataacatgtaacatttccactgtacctgatcaagctcaaagtacacctacaaaactcaaataacagacctaaaagctgaaaactattcacgaccagaaatttgaaagttatgcaacaaagacatttataatatttataatattcctgtcaacttccattgtaagagagatcctttagacacaagaaagaaaaacgtgaacacttatgctgtgatttcatactattcacaaaaattaaggtttcattcatatttgctaaatttgttatttggaaatagggcagacgggggcactttggaaaacaattctatgttagaagattatcttttgcttaattcttaacctaaggtaacagcagtatctttacacaactactgtaaagaaacattttaagttttcattatgaattattaactgtagtttaactttgacacaaagttatctctattaaagtgggttaaaaggcaggtctctgccaaaacaggactggggaaatctgtatttgttcgcttttcaattatagtcattaatagctcaagaatttttgcttttgtacacaataaagcagcaaggttgtattttgattttgaggagctgaaggcattggatcaagagttaattttcttcttcttttctgctgtacagaaatcatgtataaacagagaagggaagcccaacaaacaaaaatgagaactattattctactaaaagtaaattttgtgaccttaatctggggcaatctggtaaaagtcaaaatcgctaatgttgtgacacaatgtttaagatttgtttcaaaataatctagtttgtgtggggggatacaacatgaaacaaaaccgaccttggctatgagttaataattgtcaaagctaagtgagtgactaacacatggggttctccatactattcgagtttcgcatgttttccagaataaaaggtttttaaaaaatggtatttaaaataccatttccctattgaaatatgccattgtgatatggcagtattagacatgctttatactgcttgtatagttgtttgcttatgtgttttttttgttttgtttttttggagagagtctctctctgtcgcccaggcaacctccacctcccgggttcaagcgattctcctgtctcagcctcgggagtagctgggactgcaggcgcccgccaccacaccaggctcaagagatagtctccatctcctgacctcgtgatccacccgcctcggcctcccaaaagttctgggattacaggcgtgagccaccgcgcctaacctgcttatggaggcctaggagggtggatcacgaggttaggagttcgagaccagtctggccaacatggcaaaaccccgtctctacgaaaactacaaaaattaacacggcgcggtggcgggcgtctgtaatcccagctactcgggaggctgagacgggagaatcttttgaaccagggtggcagaggttgaaatgagccgaaatcgcgccactgcactccagcctgggcgacagcgtgagactgtctcaaaaaaaaaaaaaaattcaaacaaacattttaaattacaaacaatggtaagactgtcagaaaattctaggaaaatgtcaaaaacaaggaggccactttgccgcatgtgtgttaagagatgggtataaatcaaaatagtttcagttcactaaggaaatttaatgcctaaaacaatcctaagatacaggaggatcactcaggtaaacacacactccttactcatataaaattgaacacccataagttgcatttccttagagtacacctataaaactaagtacagaatttttaaaaacccagtatgttttagtaaagttgctgttctaaaaatcccacctgtcaccaggataaccgaaactgctccctctacactccaactgtatttttagtttttacctcaacaagtagcaatgcaatttacacttggtaagcacggattcctgaaacgccaaaatcaaccgggaacctgatttaactccaccacgctcttaacaatgaaagctacaagcagaagagaagtgtgaccttaaaaacttccacacagccgaagaacagtggcagaacagactgaagcacgtatcttcgcggaacagaagaaaacttccacacaagcaatactgcaacacggaggcggggcaagggcttaaaaggaaagtcagccaacagggaggggtgaatataagcaaagcttccgtgaaaaaaaacttatcgaggtgtagagcaagacaagacagacaaatttttccatctccgtacaccccccttcagagcccaacacacagcaagtgctctagataggtttgctcaactcaagggaagcttctgccagcaactttcccagaaatggaatgacaagaagaagctggatgatggcggggcggggagaaatggacaggttgctcatcctgcgggagatggtgaatatcctgcagttgcctaagcggagatggaaagaaacagcatccatcgtttacagactgtcaactacagtgtcccaattaagcgtacgcccctttcagatgttaacaactgaaaacaatgccctggctctggacatgggcacgcggaacactgcagcctctaagaaacccaaacggataggtaggtcaacttctatccactctgcccattaaattataccttcatatcacgctaataaattatgcagacggtttactgggacacgctgtgggtctggcactctgataagcgctttacacgccccatttcactgaaccttaagaggcagggacggtattagcagccccttttccaaccaagacacaaagactttttaagtgtcttgcctaacggggcagagccgggttcggcacccgttttggacacctgggccgtgctcttaaccactaagctacagacctgggccggcgacactgagaggctccagccctcggggacctgaagcagggacccccccccccccccgcctgcgccccagccccgggaataacttcggcatccccgcgcgcgccatgcgggacgaggaaaggcggccgcagcacctgtttgtggcaccggtgagggctggaggggatgggggcgcccggggccaggcctcagggcgccccgaggcgagggaacgcaagaggacccgcctcctccgggaaggccccgcgggctagagagaggcccgggagaaggcggaggggtgcgcgggcccgccgaggcctaggccccacccgccgcccacctccccaccgcggcggcgcccgcgagggccccaccaggcccggcccggcccggccgcctcacctggctgctgctccgagctcgtcccccggccggcggtcctgggcggtggcggcgaggaggggaaggaagaaggaaaaaagggagaggaagaagggacgaagggagggaagaggcggagtggccgtggaggaggcgggcgccgccgggccgggggggggaggcggtcaaaggaagcgggagccgagagagacgcggcagccgccggcgcaaacgctgaagagccgctcaggcgcccgcagcccggcaggaagtgacgggggaggggcaggcgcccgcccccggcccccgcccgcctccaggcccggccccggccccacccccacccacggtccgaaccacaagttccggctggcactgcggcggagcctgcgctcgcaaggcacgccgggggcccagcgggaggagcgccctgtcccgcctggaccgcagcggcccgtcctgagtcccggggcctgccgggagttgtagttctggtgggagtttcgcgctgcctgctggactcgaagcgggtctgggagaacccagcctaccttctttcctcctccacttcctttttccttccttgctgtcgcttcttcctcttgtcctgcctctggccttcctttctctccttcctgcagttgtttcttcctccatctgtaaatgttcattaaatgcttgccatatgcaaggcattgctccaagagctaagaatgtagtggtgaactgacaaaaatccctgccctcgtggagcttacattcttgtgtaagtaaaatacacaataaataaaattgaaaaatgtgtagtgagataaaagacaatggcccgggcgcgttggctcaggcctctaatcccggcactttgggaggccgaggcgggcggatcactaggtcaagagatcgagaccatcctggctaccacggtgaaacccccgtctctactgaaaatacaaaaaattagccgggcgtggtggcgggcgcctgtaggtaaacagctactcgggaggctgaggcaggagaatcgcttgaacccgggaggcggagattgcagtgagctgagatcgcgccgctgcactccagccttggcgacaaagagacactggtctcaaaaaaaaaaaaaaaaaaaaaaaaaaaaaaaaaaaaaaagacgagaagtgccagattactatttatttcacccagacctagataaactaagtggtttttagcagctgtattgtatgggaggttggagagagggtggccagtaaagaatcttggccaggcgcagtggctcacgcctgtaatcccggcactttgggaggccgaggtgggcggatcacctgaggtcaggagttcgagaccagcctgactaacatggtgaaaccccgtctctactagccggatgcagtggtgggcgcctgtaatcacagctacttgggaggctgaggcaggagaatctcttgaacccgggagacggaggttgcagtgagccgagatcacgccattgcactccaacctgggcaacagagtgagactctgtctcaaaaaaaaaaaaaaaaaaaaaaagaatcttgaacttctgcacactcagcgaaaattatgctcgcgttgtgagaggtccaagaaactgagaatgaatgaaggaactgcaggtgcacagagcttctctctcccgctcactctgggactgccgccccactatttaaaaataattctctctttcttaaatgtctctcaatctaataattgctcaatctctcttgccaacggaatataaattcaaaatacgagctgctgtgtctgaagaggcccctccaaacaaggctttggagccttagcgaagcctgggaggacacttgcctccttacattgcttcttgtgaagtgcaatgacactgaatttcagaacaccaaaaatagtcaaaggactttcaccgtccctttagtgcccatccaagacagtagtaagcaacattcagatattgtccagccctctgctaaaagtgatcttttctttctaacttccaagcagtgtggatcccatacctccttgggtaaaggagcagatgcagagaggtctccctaaacccaaagctgcgcacaatcagacaatctcgtcaaaggtgattttgctatcacccatagggacaaaagtggtgggtctatgacttccagtctcaattttcttccctctttcctccttccgcatcttttttgtttttttcttgagacagggtctcgctctgtcacctaactagagtgcagtggcatgagcacagctaactgcagcctcaacctcctgagctcaagaaatcctcctacctcagcctcctgagtagctgggaccacaggcatgtgccaccactcccagctaattttttaattttttatagagacagggttttactaagttgcccagggtcttactaagttactaagttgaccaggctggtctcaaattctaggctcaagcaatcctcttgcctcaatcttccaaagtactggggggattattccaggtgtgggccaccatacctgaccaggagtaggtcacctagatttgttttcttctgtttgtacctagaaactatcagtcaagttctcttccaaggtcctgaagacctcttgagtcttgctaagtaattaaggaatcatttttctttaccttgagaaaaagatggaagctgtgtgttcttggttcacaagaaactgtgagcattaagtatgttacgataaattatgtgtgttccttctcacaagataaattatgtgcatctgtactaaggaatgggaacatgcaaaactcataaaagccctgtgagatgctgaattttttttttttttttttgagacagaatctcactctgttgcccaagctgaagtgcaatggtgtgatctcggctctctgatgcaaagctcataaaagccctgtgagacatttatttttatttttaattattttttttttttgagacagagtctccctcagtcacccaggctaaagtgcagtggcgcgatctcggctcactgcaacctccacctcccgggctcaagcaattctcctgcctcagcctcccgagtagctgagactacaggcgcttgccaccatgccctgtaatttttgtgtttttagtacagacggggtttcgccatgttggccaggctggtctcgaactcctggcctcaggtgatccacccgcctcggcctcccaaggtgctgggattacaagtgtgaatgttaacctctgatgaattatctgttccactctcatagcctcttagtagaactttgcacccttataattttcaattatctgttgagtatatctattaggctagaactaagtgatcaacttccatgacagcagagactcagcctgtcttagtagtcatgatggtccctggcccataacacagtgccagggacacaatagtacatgataaatttccgtagactgctgaaaaattacagccttgcttatctctgcgcaagtccctaagaaacagggaacacctgtagggttgattggtgtatgtcagggtcacctgtggtatgtgtagcacaggagaacaaggttgagaactacttgctggcctaaataagtaattcccaagcttatttgaggtagcctgcactcctagggatatatcagaatctaagagcaacaattagaagacataaaaatataatggggccgggcgcagtggcttacacctgtaatcccagcactttgggaggccaaggcaggcggatctcttgaggtcaggagttcgagaccagcctggccaacatggtgaaaccccatcgctactaaacatacagaaattagccagccgtggtggtatgcaactttagtcccaggtactcgggcatgtgaggcaggagaatcacttgaacctgggaggcagaggtttcagtgagctgagatcacgccactgtattccagcctaggcaagagagcgagactccatctcaaaaaacaaaatgaggctgggcacggtggttcacgcctgtaatcccagcactttgggaggccgaggagggcagatcatgaggtcaggagatcgagaccatcctggctaacatggtgaaaccccatctctactaaaaatacaaaaaattagctgggcgtggtggcaggcacctgtagtcccagctactcgggaggctgaggcaggagaatggcgtgaacccaggaggcagagcttgcagtgagctgagatcgagtcactgcactgcagcctgggaaacagagcgagactccatctcaaaaaaaaaaaaaaaagaaaaaacaagagaaaaaagatataatggaagatcccatttacaaagcagtggaaaaataaaaatacctagaaataaactttacaagaaatatgcacaatctgtgtgaagaaaaaatgtttaattctgcaaaagaatacagaaaaagacttgaacaaagagaaatacaggttatggtattggctaggaaggttccatccagatcattaagatatcagttgatcaagacattgaaggacagcctggccaacgtggcaaaatcccaactctacaaaaaaagtacaaaaataattagccgggtgtggtggcatgtgcctgtggccccagctacttgggaggctgaagtgggagaatcgcgtgagcccaggaggttgaggctgcagtgagctgtgattgcaccactgcactccaggcttggagtgagaccctgactcaaaaaatacattaaaatttaaaaagacattgaatgagatcccaagaaaaataacaaacaggattttgttttggatctctatgagccatgtctaaagtcttatggaaaaattaataagaaaaataaccaagaactttctgaaaactcctgaccaaatagcaaacatactattggtaaagcattaccaattaaaatagttagatgctagtgcctgattagttccacaatcaatggaagagatatttccagatagacacaaacacatgtatgaatttaatactcagtaaaagtggtatttcaaggctgggtgcagtgactcacgcctgtaatcccagcactttgggaggccaaggtgggcggatcacttgaggtcaggagtttgagatcagcccggccaacatggtgagatcccatcgttactaaaaatagaaaaattagctgggcatggtggcaggcgcctgtaatcccagctactggggaggctgaggcacgagaatcgcttgaacccaggaagtggaggttgcagtgagccgagatcacaccactgcactgcagcctggccaacagagcaagactctgtctctaaagaaaaaaaaaaggccgggccggtagctcacacctgtaatccgagttctttgggaggccaatgccaggggatcacaaggtcaagagatagagaccatcctggcaaacatggtgaaaccccatctctactaaaaatacaaaaagtagctgggcgtgatggtgcccacctgtagtcccagctactcaggaggttgaggcaggataatcgcttgaacgcgggaggcggaggttgcactgagccaatatcataccactgcaactccagcctgggcctggcaacagcgcaagaatccgtctcaaaaaaacgggccgggcgcggtggctcacgccctgtaatcccagcactttgggaggccaaggcaggcggatcacgaggtcaggagatcaagaccatcctggcgaacacagtgaaacaacgtctctactaaaaaatccaaaaacttagccaggcgtggtggcgggtggctgtagtcccagctactcaggaggctgagtcaggagaatggcgtgaacccgggaggcggagcttgcagtgagcagagatcgccacaatgcactccactgtgggcaacagagactccatctcagaaaaaagaaaaaaaaaaaagtggtatttcaaattggtgaggaaaagatagatttcattttataaatactttgagacaacaaggtagcttctggggcagggggaattaaatgtgtacttcatattacataccagggaacataccaaattgatcaaatatttaaatagaagaaaggaaactgggctgggcactgtggctcccacctgtaatcccagcactttgagaggccagggcgggcagatcacctgagattgggacttgagagaccagcctgagaaacatggagaaaccccgtctctactaaaaatacaaaattagctgggcatggtggcgcacgcctgtaatcccagctactcaggaggctgaggcaggagaatcacttgaacctgggaggcagaggttgcagtgagccaaaatcgtgccattgcactctagccagggcaacaagagcgaaactccgtctcaaaaaaaaaaaaaaaaaagaaaagaaaaagaaaaaagaaaggaaactggccaggcatggtcacccatgtctataatcccagcactgtgggaggccaaggtgggaggattgcttgagcccaggagttcgaggctgcagagaactattattattactattattattttgagacagagtctcgctctgtcgcccagactgcagtgcagtggcacgatctcaactcactgcaacctccacctcctgggttcaagcaattcctcgtgcctcggcagcccaagtagctgggattacaggcgcacaccactacacctggcttatttttgcattttcagcagagatggggtttcactctgttggccaggctggtctccaactcctgacctcaagtgatccacccacctcagcctcccaaagtgttggaattacaggcatgagccaccctgtcagcttgtaatgagctatgatctcaccactgcactccagcctgggcaacagtgaaaccctgtgtcaaagtaaaaaaaaaaataataataacgggaaaccataaaagtaccagaagaattcctgcaagaatgtttgtatcactctgaagtggagaagactcttttaactataacacaaaattcggaatccttaaaggaaaagatcaattcattgactcaggaaaataaaaaatgtgataagaggaaatacaaagacaaatgataaactggaaaaaatttgcatctcagagaggatgatttcacaaatttcatgacatgtaaggaattactttgaatagcagaatgattaacaacccaatgaaaaatgattaaaagatagcaacaggctgggcgctgtggctcacgcctgtaatcccagcactttgggaggccgaggcaggcggatcacgaagtcaagacatgaagaccatcctggctaacacggtgaaaccccgtctccactaaaaatacaaaaaaattagccaggtgtggtggcaggtgcctgtagtcccagctactcgggaggctgaggcaagagaatggcgtgaacccgggaggcggagctttgtgagccgagatcgtgccactgcactccagcctgggcgacagagcaagactccgtctcaaaaaaaaaaaaaaaaaaaaaaaaaagatagcaacagacagttcatgggaaaggaaaaacaaatggttcttagaaataacaatgtaggctgggcgccgtggctcacgcctgtaatcccaacactttgggagcccaaggtgggcagatcacctgaggctgggaatttgataccagcctgaccaacatggaaaaaccccgtctctactaaaaatacaaaattagccaggcatggtggcacatgcctgtaattccagctacttgggaggctgaggcaggagaattgcttgcacccaggaggcggaggttgcagtgagatagcgccattgcactccagcctgggcaacaagagtgaaacttcctctcaaaaaaaaaaaaaaaaaaagaaaaaagaaaaaaaaaaaacaaagaaacaacaacgtaatggctgggccgctggctcatgcctgtaatcctggcactttgggaggccgaggcgggtggatcacttgaggtcaggagaatagcctgaacccaaggaggcggaggttgcagtgagccgagatcacaccactgcactccagcctgggcgacaaagcaagactccatctaaaaaaaaaaaagaaagaaagagaaaaaaagaggccgggcgcggtggctcacgcctgtaatcccagcacattgggaggccgaggcgggcggatcacgaggtcaggagatcaagaccatcctggctaacacagtgaaaccccgtctctactaaaaatacaaaaaattagccgggcaaggtggcgggcgcctgtagtcccagctactcgggaggctgaggccggagaatggcgtgaaccccggggggcggagcctgcagtgaactgagatcgcgccactgcactccagcctgggcgacagcgagactccgtctcaaaacaaaacaaaaaaaaaaaaaaaagaagaagaagaagaagaaaagaaagaaaagaaatagcaacatgaggccaggtgtggcagctcacgcctgtaatcccagcactttgggaggccgaggccggcagatctcctgagctcaggagtttgagaccagcgtggccaacatgacgaaataaaaatagcccggcgtggtggcgcatgcctgtaatcccagctcctctcgaggggagaatcatgaatcgttgaaacccaggagccggaggctgcaggctgcagtgaacagacatggcaccacagtaccccagcctgggtgacagcgagactctgtctcaaaaaggaaaaaaagaaaaaaaaaaaaaagaaacagcaacgtgaattcaaggatattaacagaagcacagtttgtaataacaaaagtttagaaataacatcaatggttcggacgtggtggctcacgcctgtaatcctagcactttgggaggccgaggcaggcggattgcctgagctcgggagttcaaaaccagcctgggcaacatggtgaaacgtctctactaaaatacaaaaaaattagccaggcgtggcggcatgcacctgtagtcccagctactcgggaggctgaggcaggagaatagcttgaacgcgggaggtggaggttgcagtgagccgagatcgcaccactgcactccagcctgggtgacagagtgagactctgtctccaaaaaataaaataaaataaaacaaaataacatcaatgtccatcaacctaagcttggctaaataagtcatgacatattcatacaatagaataatgatcagtagttaagaaaaaaaaaaaaaacgaggaaggaccccataaagagaatgaaaaagcaagtcgcagatttggagaaaacatttgtaaaataaaaagttgtatttggaatacatacatatatacatatacataattttcttttctttttcttttctttttttttttttgcgatggagtcttgctctgttgcccagactggagtgcagtggcgcgatctcagctcactccacctctgcctgccgggttccactgcttctcctgcctcagcctcccgggtagctgggattacaggcatgtgccaccaggcccagctaatttttgtatttttagtagagacgggggttttgccatgttgcccaggctggtctcgaactcccgacctcacgtgatccaacctcctcggcctcccaaagtgctagaattacagtcatgagccacggtgctgggcctacgattttcatttttatttttttcttccagtcagaatcttgttctgttgcccagtctggatagcttgatcttggatcactgcagcctcaaacacctaggttgaagcaaacttcctgcctcagcctcccaagtagctgggaatacaggtgcacaccaccaccgccaactcattttttttaattcttattagagacaaggggctcactatgttgctcaggctggtctctaactcctggcctcaagaaatcctctggcctcagcctaccaaaagtgctgggattataggcgtgagccacactgcccagccatatctggaatatattaagaactcttacagcttagcaataagaaaaacaaatgggcaaaagatctgtacagacattttgccacagaagtttataaaagtatatgagtggcaaatgagcatataaaaagatgtcattaggaaatgcaaataaaacacacatatacatacacatgggatataccattacacatttattagaatgtctaaaattaaaaataaaaataggccgggcgcggtggctcacgactgtaatgccagcactttgggaggccgaggtgggcagattatgaggtcaggagttcaaaaccagcctgatcaacctggtgaaaccctgtctctactaaaaatagaaaaattagctgggtgtgtgcctgttatcccagtttactcaggagcctgagtcaggagaatgacttgaacccagcaggtggaggttgtagtaagctgagatcatgcaactgcactccagcctgggcaacacagcaagactccatcttacaaataaaaaataaagaaataatatataaaaataagaatgggatgggcatggtggcttatgcctggaatcccagcactttggaagcccaagacagacagatcacttgaggtcactaattcaagactagcctggcccacatgataaaactccatctctactaaaaatacaaaaatggccaggcactgtggctcccgcctgtaatttcagcactttgggaggccgaggcgggcagatcacgaggtcaggagatcaagaccatcctgactaacactgtgaaaccttgtctctactagaaatacaaaaaattagctgggcatggtggcatgtgcctatagtcccagctacttttgaggctgaggcaggaaaatcgcttgaacccaggaggcagaggttgcagtgagccaagatcgtgccactacactccagcctgggtgacagaacaagatgagaccccgtccccctgcccccccgccaaaaaaatacaaaaattagctgggcgtggtggtgggcacctgtaatcccagccactcgggaggctgaggcaggagaatcacttgaacccgggaggcagaggttgcagtaagccgagatcgtgccactgcactccagcctgggcaacagagagagactccatctcgaaacaaaacaaaacggacaacaccaaataggagaatgtagagcaactggaactttttggactacaggtgcataccatcacgcctggctgattttttttattttgagatggagtctcgctctgttgccaggctggattgcagtggcgcgatctcggctcactgcaacctccacctcctgggttgaagtgcttctcctgcctcagcctcccgagtagctgggactacaggcatgcgccaccacgcccagctaagttttgtatttttagtagagatggggtttcaccatgttggccaggatggtctcaatctcttgaccttgtgatccgcccacctcggcctcccaaagtgctgggattacaggcctgagccaccgcgcccggccatgtttattttattctttatttttatttttattttatttttcttttatttacttatttttttgagacagagtcttgctctgttgcccaggctggagtgcagtggtgcgatcttggctcactgcaacctctgcctcccaggttcaagtgattctcctgcctcagcctcccgagtagctgggattacaggcgcctgccaccacgcccagctaagttttgtattttttagtagagacggggtttcaccacattggccaggctggtcttgaactccagacctcaggtgatccaactgcctcagcttcccaaagtgttgggattacagatgtcagccactgcacccggccatatttttttataatttgtagagatgggatctcactatattgcccaggctggtctgcaactcgtggcctcaagaggtcctcccaccttggcctcccaaagtgttggggttacaggtgtgaactgctgcacccagccaggaactcttattcattgctgatgggaatgcaaaatggtacagccacctggtatgacagtttggcagtttcttacaaagtttaagatatacttatcatacaacccagcagtcccagtcctaggtgtttacacaacttaattaaaaacttatattcacactaaaatcttacacccatgtttatagtagcttaattcataagagccaaaacctggagacaatcaaaatgtccttcaacaggtgactggataaacaaactggtacatttgtaaaatggaatccaactcagtaataataaagaacaggagcggccaggtgcggtggctcacgcctgtaatcccagcactttggaaggccgacgcgggcggatcacaaggtcaggaaatcgagaccatcctggctaacagggtgaaacaccgtctctactaaaaatacaaaaaaaatttagctgggcgtggtggcgggcgcctgtagtcacagctactcgggaggctgaggcaggagaatggcatgaacctgggaggcggagcttgcagtgagccgagatcgcaccactgcactccagcctgggcgacagagcaagactccgtctcaaaaaaaaaacaaacaaacaaacaggagctgtgtccatgaaacaacatggataagctttaattgcatctctctaggtggaaaaaacttagacccaaaagcccccatattgtttgcttccatttctatggcattctggaaaaggtaaaattatagggacagcaaatacatcaggcccagtgcagtggcactttgggaagcccaggagggaggatcacctgagcccaggagtttgagaccagcctgggcaatatagtgagatgccgtctctaccaaaaaaacccacaaaaagtagccaggtatggtggtgcacgcctgtagtctcagctgctcaggaggctgaggcaggaggatcacttaagcctgggggactgaagctgcagtgagccgtgatcatgccactgcactctgcacttcagcctgggcacagagtaagacccactctcaaaaaaaaaaaaaaaaaaaaaaaaaaaaagaagaagaagaagaaaagaaaagaaaagaaaacagatcagtgagatcagtggttgtcaagggctggggaagggaaaggaagttgatggaactgttctctatgctactaaaatggtagatatatgaccgaatatttcaaaacccttatgcagtaacctttattgtacacaaatatttaagaataaacaaggatgtctgaggatacgaggatggaatgaaaactgtgacaaactaatgtcattgatgaggaagggagaaaaaaaagtcactgacttaattaactttggaaaatgtgttttgactggctaaggcaaaagccaaaagaactgcacattgacactgtactccagttggtaaatttgtctctcacaaaaatggggaatattggcctgggcatggtgactaacgcttgtaatcccagcactttggggggctgaggcgggaggatcacctgagatcaggagttcaagagcaccctggccaatatggcaaaacaccatctctactaaaaatataaaaattagccgggcgttgtggcaggcacctgtaattccagctattcaggaggctgacgcagtagaatcgcttgaatccgggaggcagaggttgcagtgagtcaagatcacaccactgcactccagcctgggtgacagggcaagactctgtctcaaaaaaaaaaaaaaaaaaaatggggaggggggaatattaaaatattgtgaactgaatgaagacaaaattacatgtcagaaatttggagatgcagctaaagaaatacttagagggaaagttgtagcattaaatgtttatattagaaaataagaaatgcctcaaatcagtaacctaattttctaccttaagaaactagaggccaggcgcggtggctcacgcctgtaatcccagcactttgggaggccgaggcaggcagatcacgaggccaggagattgagaccatcctggctaacacggtgaaaccccgtctctactaaaaatacaaaaaattagctgggcatggtggtgggtgcctgtagtcccagctactcaggaggctgaggcaggagaatggcgtgaacccgggaggcggagcttgcagtgagccaacatcgtgccactgcactccagcctgggcgacagagcgagactccatctcaaaaaaaaaaaaaagaaagaaagaaagaaagaaagaaagaatcaactagaataggctgggacaccgggcgtgatggctcacattgtaatcccagcactttaggaggccgagctgggcagatctcttgaggtcgggagttcgagatcagcctggccaacatggtaaaactcgatctctacttaaaaaacataaaaattagccgggcttggtggtgcacacctgtaatcccagctactggggaggctgaggcaggagacttgcttgaacccaggaggtggaggctgcagtgagccaagatcacaccactgcactccagcctgggtgacagagcaagactccatctcaaaaaactaaaaaataaataaataaataaataaaataggctgaaagtagtggctcatacctgtatttctagcactttgggaggctgaggcaggaggatcgctttagctcagctcagtagttcaagaccagcttcaacaacgtagggaaaccatgtctctacaaaaagaaaaaaaagaagaagaaggagaaggaggccaggctccgtggctcaacgcctgtagtcccagcacttttgggaggctgaggtgggtggatcacttgaggccaggagtttgagaccagcctggccaacatggtgaaaccctgtctctactaaaaatacaaaaattagccagcaaggtggtacgcctgcctgtaaccccagctacttgggaggctgaggcatgagaatcgcttgaacccaggaggtggagattgcagtgagctgagatcacaccactgcactccagcctggatgacagagggatgctctgtctcaaaaaaagaaaaaaggaaaaagaaattagaataagatcaaattaaacccaaagtaagtgtaagaaaataaataataaaagacaagagtacatatcaatgaggggtgggcatggtggctcacacctgtaatcccaatactttaggagcccgaggcgggcagatcacctgacgtcagcagtttgagaccaacctggccaacatgatgaaaccccatctctaccaaaaatacaaaacttacccaggtgtagtggtgcatgcctttagtccgagctattagggaggctaaggcaggaagatcgcttgacccggggaggcagaggttgcagcgaaccaagaacaatagagaaaatctgtgaaaccaaaagtgatctctttgaggagggaaaatcaataaaattgataagtttctaaccaggatgatcaataaaaaaagccagaatatttgtgacaggtccagaacatacatatatgctttgtaatggacatagcttctctggattttaaggtgacgattcgagaggaaagcttggggataagagaagaaagagccctttcattgaaataccttttagtattcttttaaatatgcatatataattacatatgcaataattattcacaaataaaatgctatatatttttattttatttatttatttttttgagacggagtctcgctctgctgcccaggatggaatgcagtggcacaatctcggcttactgcaacctccacctccctggttcaagcaaatcccctgcttcagcttcctgagtagctgggattacaggcgtgcgccaccacgcctggctaatttttgcatttttagtagagacggggtttcatcatgttggccagactggtctcgaaatcctgaccttgtgatccgccgccttggcctcccaagtgctgggataacaggcaagggccacctcgcctggccagggggtagtagttttaaaagatatatttatccattcatttaataattgctgtttattatttctacaatacttacacttttttaatacttacagaatactgcaaatgaaggttttctaaaacaatattgttttgtgtatttactttttttttttttagagtctcactctgtcactctgtcacccaagctggagtgcggtggcatgatctctgctcactgaaacctcccaatcccaggcttaagcaatcctcccacctcagcctcccaagtagctggtgccacaggccctcaccaccacaccctattttttgtattttttattgtgtactttaaaattttatgtaaatggcatcatgttatctgaattcttctgtgacttgtgtttttcccttcaacattacattctgaatggttcacctatatttacatgcatagttctattttttcattttcagtgctatacagtattccaacaaatggatatgttatttttatatttacccaggctcgttctgaggatcacttaggttggtgtcctttgttgctatagtaaacaatgctgctgtcaacattcttgtatatctccttatgcaattggtggattttacattatatatatatatatatatatatatatatatgtgtatatatatatatatatatattttttttttttttttttttttttttgagatggagtctgtcacccaggctgaagtgcagtggtgcaatctcagctcactgcaacctctgcctcccaggtttaagccattctcctgcctcagcctcctgagtagctgggattacaggcacccgccaccatgcctggctaattttttgtatttttagtagagacagggttttgccattttggcccggctggtctcaaactcctgacctcaggtgatccacctgcctcagcctcccaaagtgttgggattacaggcgtgagccactgtgcctggcccactcctggtctttttctccacccactgtcataaaaaaaaattcacaagattttgtacagaaatattatgggctcaagggtaattgaggagagaagcagtgatcatgagttcattttaggtcaacaagatagcccctgttggcttagctgacctggttatttctcaaatttaataccaagtaacccaatgggaaaagcaaatcccgtgctatataaatttaaaacgtattttcgtattatactggaggcagaaggctaaagggagtcattctcctcataatgatggagagcgttttggtcatgcaaaatagcttttggtggccttgtgcaagttacttctcattacgcacacaagtgctcttattatatccacatattgcctggtctctagataatttctatgctttatgacagttttttttttttttttttttgagatggagtcttgccctgtggcccaggctggagtgcagcggcacgatctcggctcactgcaacctccgcctcccgggttcaagagattctcctgccccgtcctcctgagtagctgggattacaggcacgcacctccatgcccagctaatttttgcatttttagtagagacggggtttcaccatgttggtcaggctggtctcgaacttctgacctcgtgatccacccacctcggcctcccaaagtgctgggattacagacatgagccactgtgcctggccaaagttagctttctttttttttttttgagacagagttttgctcttgttgcccaggctggagtgcaatggcacacaatcttggctcatcacaagctccgcctcctgggttcaagcgattctcctgcctcagcctcccgagtagctgggaatacaggcatataccaccacacccagctaattttgtatttttagtagagacggggtttctccatgttggtcaggctggtctcaaactcctgacctcaggtgatctgcccaactcggcctcccaaagtgctgggattacaggtgtgagctaccgtgtccggctaattttcttttcttttttttttttttttgagacagagtctagctctgtcacccaggctggggtgcagtggcacgatctcggctcactgtaatctccgcctcctgggttcaagcgattctctgcctcagtctcccaagtagctgggactacaggcgctcgccaccacgcccagctgattttttttttttttttgtattttttgtaagtacggggttttaccatattggctaggctggtctggaactcctgacctcaagtgatccacccgccttggcctcccaaagtgctgggattacaggcgtgagccaccgcacccggccaaaattaattttcttaatcaaagtaatgtgtgtccatagtttagagagtcaaataattttaagaagcttatcatgaaaaacaatgtccactcaactcttcctcttggcatcttccttctggtttttttttttttttttttttttttgaggcggagtcttgctctgtcgcccaggctggagtgcagtggtgtgatcctgggccaccgtgcccggccatcttccgtttttttttttgagacagggtcttgctctgtcacccaggctggagtgcagtggcatggtcatggtttactgtagcctcgacctcctgggctcgagtgaaccgcccaaagtactgagattataggcatgagccaccatgcctggccaacatagcaagaccctccctctattttttaaaaaataataaatttttaaatgaaattttatatatatatatatatatatatatatatatattttattttatttttttttttttgagacagagtctggctctgtcaccaggctggagtgcagtggcatgatctcagctcactgaaatattcacctcccgggttcaagcaattctcctgcctcagcctcccgagtagctgggattacaggcgtgcgccaccacacccagctaatttttgtatttttagtagagacggggtttcaccatgttggccaggatagtcttgattttctgaccttgtgatccacccgccttggcctccccaagtgctgggattacaggcgtcagccacctcgcctggccaaaaaaataatttttaaaaaattagctaggcacggtggtgcatgtacctgtagtcccagctacttaggaggctgaggtgggaggaccacttgagcccaagaatttgaggctgcagcgagctatgattatgcccctgccttccagcctaggcgaccgagtgagaccctgcaaaaaaaaaaaagaagccaaaagttccctgggataggaatagccccttatgagcacctgccaagtcagagtgtccaccatgccacttttctctcgcctccactgcccccttctgtcctggaggagccaggggctgacttgtgagtggagcagggttagtggaaggcttgggtggaagaaatagagaagtcctccgggcaggcctctttttctgtcttcatgtggccagtccaagcaggctgaagtggaagaagggaatttaattaactttaaatgaattttaaattttttttgtttggttggtttgtttttgagacagagtctcgcactgttgcctgggttggagagcagtggtgtgatctcggctcactgcaacctccgcctcccaggttcaagcaattctcctgcctcaccctcccgagtagctggcattacaggcacccaccaccacacctgcgtaattttttgtattttttttttagtagagacaggctttcactgtgttggccaagctggtctcaaacggctgacctcgtgatccacccatctcggcctcccaaagtgctgggattataggcgtgagccaccacgcccggctccaaatgggcttttaaattactgaaccgagactgtttgggggttgtaagtgaccaagataattttattttatttattttgagatggagtctcgctctgtcacccaggctggagtgcggtggcatgatctcggctcactgtaaccgctgcctcccgggttcaagtgattctcccacctcagcctcccgagtagctgcgattacaggtgcacaccaccacacccagctaattttttgtttgtttgtttgtttgtttgttttgagacggagtctcactctgtctccaggctggagtgcagtggcgccatctcagctcactgcaacctcagcttcctgggttcaagcgattctcctgcctgagccttccaagtagctgggactacaggcatataccaccaagcccagctaatttttgtatttttagtagagacggggtttcaccatgttctccaggatggtctcgatctcttgacctcgtgatctgcccacctcagtgacccaaagtgctaggattacaggtgtgagccaccgcacgtggcctatatatatatttttttgtatttttagtagagatggggtttcaccatgttggccaggctggtcttgaattcctgacctcaagtgatctgcctgccttggcctctcaaagtgctgggattacaggcgtgagccaccatgcctggcacaagaaaattgtattgcctgagagtcactaagaaagcaatggctttgggagaccaaggcaggaggattgcttgaggctaggagttcaaaaccaacctgagcaacatagtgagatcctgtctttttttttttttttgagacagagtctcgctctgtcgcccagattggagtacagtggcgtgatctcggctcactgcaagctctgcctcctgggttcacgccattctcctgtctcagcctcccgagtaggtgggactacaggtgcctgtcaccatgctcggctaatttttttgtatttttttaatggagacggggtttcaacatgttagccaggatggtctcgatctcctgacctcctgatccgcctgcctcggcctcccaaagtgctgggattacaggcgtgagccactgcgcccggccgatcctgtcttttttttttattcatttatttagagaaagtgtcttactctgtcacccatgctggagtgcagtggcacaatctcagctcactgcaacctctgcctcccaggctcaagtgattctcctacctcagcctcccgagaagctgggattacaggcacataccgccacgcccagctaatttttgtatttttagaagagacgggtttcatcatgttggccagagtggtgtcgaactccttggctcaggtgatttgcctgcctcggccttccaaagcgctgggattatgggtgtaagccaccgcgccaggcccctgtctctatctaaaaagaaaaaaaaaaaaaagccatgggacttaccctagatttcattcaaggtatggggaagaactggcttcccagagacaaactgaacatgcaaagaataaagttgttttctgtctataccctatgcatgagtcccaccacctgatcaataaattggcttacaacatagtgaaaccacatctgtacagttaaaaaaaaaaaaaaaaaaaaggaaggccagacatggtgcctcccacctgtaatctcacagtttgcgaggccaagttgggtggatcacatgaggtcaggagttcaagaccagcctgaccaacacggtgaaaccctgtcactactaaaagcacaaaatttagccgggcagggtgtcggatgcctgtaatcctagctacttgaaggctgaggcaggagaatcacttgaacccaagaggtggaggttgcagtgagctgagatcataccattgcactgcagcctgggcaacaagagcaaaactctgtcccaaaaaatatacataatgataattggccaggtgtggtggctcatgcctgtaatcccagcactttgtgaggccgaggcaggcggatcacgaggtcaggagatcgagactatcctagccaacatggtgaaaccccgtctctactaaaaatacaaaaaaattagccaggcatggtggcaggcacctgtagccctagctactcaggaagctgaggcaggagaatcccttgaacctgggaggcagaggttgcagtgagccgagatagtgccattgcactccagcctgggtgacagggcaacactctgtctcaaaaaaaaataataataataatcaaaaaaataaataaattcgctacgcttagttttctgtatacttatctctgattggtgtgggttcctctcctgaccagttgggcagctgtggcactgtgtcttgctttaacctttttcctgggctggatctcctgtttcctgaattccatgagttccttttgcatagttttctgcctcatgctccactcacttcctgtcaaaggggtggacactacatatctggaaatgtcttttcgttctcacacttcatggataatttagctgggtatacaatgctaggttagaaatcattgtccttcaggaatggagttctttctcattccagggggcaaatgtgtttcttagctactttacacatgtatgagaaaccaacttttttcttcctcctcttctctctctcctttttttcctccttctcctccttgtttctggtagtggtgggggaaaattctacatcactaggttttcaaactctagagctgtcaaaaagcacacagctgttttcctaacacagactttatttacatagcagaaaaaggacttggcacttacactttgcatattgtttgaattactgttaacagggagagcaggcttatgtaatcaagtctggcttttcttggttgaaaaacttgttcttgtatcttcataaatggtaaaaatgacttttctatcatcccccatactgcaactcttccttttaattttttctttttagaaattatatattgaagtgaattcacataatataaaattagccatttcacagtgaacaattcagtgacatttagtacattcacaatgttatgcaaccgtaatctctatgtagttccaaaacattttaatcactccaaaaggaaacctggcattcattaagcagttagtccccatcccccaattccctaatcccccacatttctggcaactaccaatctgcttcctgtttacctaaataggatttacctattctagataatcagtataaatggaataaaataatatgtaacctttggtgtctggcttcttctacttagtataatgtttttgaggttcatccacaatgtagcatgtatctcacttcattcatttttataactgaataatatgccattatatggatataccacaaattgtttatccattcatgtattaatggacatttgagttgtttctgccttttgtctactgtgaatagtgctgctgtgaacactcgtgtacaaggatttgtttgagtccttgctttcacttcttttgggtgtatacttaggagttgaattgctggttcatatagtaattctttttttttttcttttaatagaggcagggtctctgtatgttacccaggctggagtgtagtggctattcataggcacaatcatagcacaatgcagtcttgagctcctctcctcaagtgatcctcctgcctcagcctcctttttttcttttcttttttggaaatgtagtctagttctgttgcccaggctggagtgcaatggtgcgatctaggctcactgcaccctccacctcttgggttcaagtgattctcctgtctcggcctcctgagtagctgggattagaggcacatgacaccacacctcattaatttttgtatttttagtagagacggggttttaccatgttggccaggctgatcttgaactcctggcctcaagtgatcagcccacctcagcctcccaaagtgctgagattataggtgtgtgccactgctcccactctgcctcagcctcctgagtagctgggactatggcatgtgccagagtacctggctgtcatatgctaattctatgttaacttttttgaagaactaccaaactgttttccacaccagctaaccattttacatccccactggcaaggtacaggggttcaaaatgttcatatcttcatgaacagttggtttttttgttttgttttgagacagggtcttactctgtcatccaggctggagtgcagtggcacggtcatggctcagtgcagcttcaacctccccagactcaagtgatgctctcatctcagcctcctgagtagctgggactacaggtacataccaccatgcctggctaattttgtattttttgtagagacagggttttgccatgttgcccaggctggtctccaactcctgagctcaagtgatgccccttccttggcctcccaaagttatgggattacaggcatgagccaccatgcccaggtgagcaccttttcatgtgctttttggccacttgtatatcttctttggagaaattttgtttatttttctagctttattgaggtataattaacaaattttgcataattcaaggtatacaatgtcatgattgaatatatgtattcattgggaaatggttgccacaatcaaattaacatactcatcaccacacatggttaccatcttttagataaaggcttattcatgtcctttctctgttttttcattgagttgtttggtttgtagttgttgagttgttaaagttgtttatattttctggatattccccttaaaaacggaagctattggaattttttttttttaggcagagttttgctcttgttgcccaggctggagtgcaatggcgtcatctcagctcaccacaacctccacctcccaagttcaagcaattctcctgagtagctgggattacaggcatgtgccaccatgtctggctaattttttgtatttttagtagagatggggtttctccatgttggtcaggctggtctcgaactcctgacctcaggtggtccacccaccttggcctcccaaagtgctgggattaaaggcttgagccatcgtgcccggcctactggaatttttactgttgtaatatcgggtaatatgtgttacccaatgtgggagcaaccatttgttgcttaacaatagccatttctcaaacttttttattttattttatttatttatttatttttgagacagggtctcgctctgtcatccaggctagagtgcagtggcatgatcctggttcactgcagccttcacctcctgggctcaggcaatcctcctgcctcagactcctgagtagctgggattataggcgcacactaccatgtttggctactttttgtaattttgtattttttgcagcaatgggggtctcactatgttgcccaggctcatttctcaatttttttttttagacagagtttctctctgtcacccaggctggagtgccgtggcgcaatcttggctcactgcaacctccgcctcctggattcaaacaattctcctgtctcagcctcctgagcagctgggattacaggtgtgggccaccaacccggctaatttttgtatttttattagagatggggtttcaccatgttggtcaggctagtctcaaactcctgacctcgtgatccacctgcctcgggctcccaaagtgctgagattacaggcgtgagccaccgcgcctggcctatttgcttttaatgtggggcgattataatcaatgctgaaaagaacactcttgcattttaaaacatgcttacttacccaattaattaattcccattggaaaatcttaaagatggttaagatgagtcacaattcagtttcaggaagcaggtaaatgggctggagaaaataaatccagcctcaccaatgccaccctatttagtcctcccaacagccatataaagtagataaaaaatatcactactgtctctttcaaactctgttttcaaaaggtgaggtataagcaatcaagtaaaatggagatggaaaactgaaaaccacgaaaagatcaaggcttgcccatggaacacagataatgtccaagtgataatcattctatgcttgaatcagaagatttggggccatggccaggtgggtggctcatgcctgtaatcccagcactttgggaggccgaggcgggtgggtcacctgggtcaggagttcaagaccagcctcgccaacatggtgaaatactgtttctaataaaagtacaaaaaattagctaggcatggtgatgcacccctgtaatcccagtttcttgggaagctgaggcagggaaattgcttgaacccaggaggcagaggttgcaatgagctgagatcatgccactgcattccagcctgggcgacagagctagactctatcacaaaacaaaacaaaacaaaaagaaagactgggtgtggtggctcacgcctgtaatcccagcactttgggaggccaaggcaggtggatcacctgaggtcaggagttcaagaccagcctagccaacaaggtgaaaacccgtcactactaaacatacaaaaattagccaggcatggtggcatgtgcctgtagtcccaactacttgggaggctgaggcaggagaaccgcttgaacccgggaggcagaagttgtagtgagctgagattgtgccattgcattacagcctgggtgacagagtgagattccgtctcaaaaaaaaaaaaaaaacaataacaagaagaagatttgggtccatgtctaggagataatgtctagatctcaaacagacctagagtcaaatgcctgccacccctcttactgtatagaaggtaagctactcactttctgggcttgggttcctcatctgtccaatgggaatagctcatagagtcatgaggattaaattagatcatgcttgtgaagcatcaggcatgaatttagctctcttgctttttctctgactccacattgctaatcaagttcagcctcatgacctaattacttcccaaagctcccacctcctaatgcatcagttggggttagaatttcaacacatgaatttgtgggggacacaaacatttagtccataacagaaggaacatgggatcagttaggattagattcagttgcatgtgacaacaaaacaaaacaacagtggtttcaacaacatagcagacaatttgacctcacataaatgaaggctgaggaagtctgaggttgctagtccaaggcttacatggctgtgctccctaaagaccttagaagcgcaggctccttccagctctctgatccaccatcctcatcctcctggcccaagatgggaatgagagtgacagccactccatccaagtctgttcccactttggggcttttgcacttgctgggtttttttcttagaaatcttcatctgagcctctttctctgcctttgagtctcagctttggaatgtggtcaccgtctcagagagggctcccctaaccacatgcctcaggcccctcttgttgacccgccttttattcttcatctcacttatatcacctgtatgtatcacctggttctgatacctaccaaccttctgaccttgggcaatttccttaatttcctcaagagcctcaatttcttcacctgtaaaatggggatataacagcacccataggaaacttacactttagattcatgagagtggttggctcttgagtgttggggagaaaagaaacggtgatatctacagtgtccacagcagagcttagaacaaagtagaatctcaataatatttgtgggattaaggaaaatattatgttaataaactcatcttcagttggtgccactactcaatagtagaatattgctcaacattgattactgagtaacattcaccttgagtctccgagaataaaatcagtagaaaactccctgctttgccaggcgcagtggctgacgcctgtaattccagcactttaggaggctgaggtgggtggattgattgaggccaggagtttgagaccagactggccaacatggtgagaccccagtttcttctaaaaatacaaaaattagctgggtgtggtggcacatgcctataatcccaggtacttgggaggctgaggcaggagaatcatttgaacccaggaggcagaggttgcagtgagccaaggttgcaccactgtactccagcctgggtgatatagcaagactatgtctcaaaaaaaaaaaaaaaaaaaaaaaaaaaagaagaagaagaagaaaaaaaaagaagaagagaaaaagaagaagaaaactctttgctttgaattggggggcatagctgggtgcagtggcccacacctatagttccagctatgcaagaggctgaggctggaggatcacttgagcccaggagttccagtccagtgtgggcaacatggcaagacccttatatcttaaaaaaaaatccctcaaggctgggtgcggtggctcacacctgtaatcctagcattttgggaggccaaggcaggcagatcccttgaggtcaggagctcgagaccaacctggctaacatggtgtaaccctatctctactaaaaatacaaaaaaattggccaggcatggtggcgggtgcctgtaatcccagctactcaggaggctgaggcacaagagtcgcttggacccaggaggcagaggttgcagtgagccgagatcatgccactgcactccagcctgggcgacaaagtgagactcatctcaaaaaataagtaattaattaaaaaaaattaaaaactctcaaaataaaaaaaatgaattgaggggagaaaacttcattctcctgagcatagctaatgatctgggactgatgtgaaacccccaaagagaaaaataagaaatttttttttcctttttcccagtctattccttttagacttgggtttgggagggagataaaaagaatgacatgggacgtggcagggaagtaggctgggggtgaaagttgagatcgatttcataggaaggtgaagcagatctctgaagctcccaacatctttgacctccaaggatctcagaagacttgctcattcttgggcaaggctttcaagatcttcatatctgcctacatcttatccattgcaaatcattctggggaattaggatgtgaaggcagccaggatttggccccatcaaataaagaggtaataagattgcaacccacggggcacagatctccaaagagatggtgctgatgtctctgagcccagaggctcccatggggctgggacccaaaccttggagaatgaggcgctgctcagcgttgctggtgctctggctgggtacagaaaagctggttctgtgagtattaaaaagaaaaacaagcaaccccccactccccggcgctgccaaatggaatgaattgctgcttctagggagaagtgctgctggagtgacacaggaatgcgaaatagaacaagacccaagttcccgcttcctcctccagtgctccgttctctctcacatgcgccccctgctggcagatcctaacaaggaacttgatggcaaagtacaaacatggttcctggagtcccaccccaggtacatgagtcaggtatagaagggttagtttgaagctgacagtaccgtaataacgggcacagcttattaatttgaaaactattagatgaaactacacaaagaaccaagaacaaaaacttgtgttccccagtaccattttgcatcctttgtatccggagtttttctttagctgttgtatatccttcctaacagtgtctttattttataaataactaggaagttacccaagaccacacagtaaggagcagaagcaggatttgaatcaaggctgtgtggctccaaagcccatcctgttttttttttccttttaaaatatatatatatatatatttttaggccaggcgcagtggctcatgcctgtaatcccagctactcgggaggctgaggcaggagagtcgcttgaacccaggaggtggaggctgcagtaagccgagatcgcgccactacactctcacctgggcgacagagtgagaccctgtctcaaaaataaaaataaaaataaaataaaataaaataatttttttttgagacggagtttccctcttgttgcccaggctggagtgcaatggtgtgatctcagctcaccgcaacttccgcctcctgggttcaagcgattctcctgcttcagcctcccgagtagctgggattacaggcacacaccaccatgcccggctaattttttgtatttttagtgcagacggagtttcaccatgttggtcaggctggttttaaactcctgacctcaggtgatccacctgcctcggcctcccaaagtgctgggattacaggcgcgagtcaccgcgcccagctagcaatatatatttttttaattcacattttccatcactccctacaaagcccaatctttttttttttttgagatggagtcttgctctgtcgcccaggctggagtgcagtggcacgatctcggctcactgcaagctctgcctcctgggttcacaccattctcctgcctcagcctcccgagtagctgggactacaggcgcccgccaccacgcccggctaatttttttgtatttttagtagagacggggtttcaccgtgttagccaggatggtctcgatctcctgacctcgtgatccgcccgcctcggcctcccgaagtgttgggattacaggcgtgagccaccacgcccagccaacacgtttttaattaaaaacaaacaaacaaacaaacaaacaaaaaaaacatgatggggtcttgtcatgttgcccagggttgtctggaactcctgagcacaagcgatgcacccacctggcttcccaaagtgccgtgactaaaggtgtgaaccaccttgcctggtcttgatttttattttcttctgagattttttttcccctacaataaacattaattttaattaaaaagtttcggggctgtgcgcagtggctcacacctgtaatcccagcagtttgggaggccgaggcaggaggattgcttgagcccaggagttcgacaccagcctgggcaacatggtgaaactccgccgggcgtggtggtggcgcctgtacctccagttactcagaaggctgaggcgggaggatcgcttgagcccgggaagtcggggttgcagtgatccatgatctccactgcaccccagcctgggcgacagagccaaaccctgcctcaaaaaaaaaaaaaaaaaaaaaaaagacaaaaaattacttagaattttaccacccagaagcaatcacagctaactgcttattgtattttcttccacagcttttttttgtatctaaatatacacatctagagtttataaatgcaactctttagactctctcacccttccaccctcctcaaatactgccaccgttttgaggccggagacaatggaatttgcttacctaaaaagctccgccccttgatggcgtcacacgaaaccaaccacgccccatattgccgcatgcgcactcttaagaggtcgaacggggagggcggcaggggctctggaacggaagtgacgcatggtacttgcgcaaagacgacgaggaggctgcgaaaagttaagggccggaccgcaggctgtgctcgcttccggaagtggcttctgcgacaacatgcttgcggacctcggcttaatcggaaccataggcgaggatgacgaggtgccggtggagcccgagtctgactccggggacgaggaagaggaggtatgagcacggttctggtctttgggtttccttgactgcttcccttcctcgcgattcctcaggtccctgtccccgaatcctcatcatcccctgccagccccggaagtttcccgaaaaggatctcaccgggaccccaagatcttcctcagtttccccgccactaggttatctctacgtccgcctgcttctttggccatgtcgttccctgtctccttgctgaactcagtatctattcactgaactgatatttaaccacgccctgtgtaagagacggcaggtttcttacaccttgtaagaggtgaagtcagccatggttcctgctcaaggagccatggttagctgtcctttcgtatgttcatcgagccagtgtttattgaatacttaacgcctgctagacttagtgttaagcgttgggggcgtagcaatgaacaaggtgagtgccactctcctgaagcgtatggtggtgtgggggcttgcagacattaagcagtatggcaattaaagaggtattggtgttctgaaaaggatgcttgcccttcaaacattcagcccagatgttgtcccctctgcactctcatctgtccgcctgataggtttatccagatgtcccatggcctctacaaattcaactcctccaaagatgaacttgtgttcactctcatcctgttcccttctcaagccagaaaccttagagttattcttgacagttttttcttcctcaccgccgccagtgctctgcaagctagctcatgaatctctcttaagcttctcccgcctctctccattcacactgtacccaccctagctccggctactgctgtctcatgcttgcacaccagcacacctgcagtccaaacatacttcatcttcatctctttatcttgagcacttccagtgtattcttcgcttagcagcagagggatctctgcgatacagtcacgttagagacctcccttgcttaaaactctccagcctgctggtagagacccccgggcctgtccaccttgcaaagactcctcaggcagcgtctgggtcccgtacactgtcgccatttccccgatgtcccctgtgggcgcgggcggccacccaggcctgctggctgcggccccctctcggacaggccttggctcagcccgctgcgtgggaggtcatgggccagtccccgaggagccaggcccctgtacagtgcccggtcacacccatgatgcggggtgtgtttgtcacacccatgatgcggggggaattgtttgtgtttgtttttcaagaaatgattcaaattgctaaaaacaaaacaaaacaaaacaaaaaaaactctccagcctgctttcacgtggctttcaaggtcctcacgatcttgtcctttccaccttgactttcatctctcacagctctcctcttcatgaccaacactccagtctcattcacttcatttttttttaagacagagtcttgctcggtcgcccagggtggagtgcagtggcgcgatctcggctcaccgcagcctccccctcccgggttcaggcaatcctcctgcctcagcctccctagtagctgggactacaggcatgcgccaccacgcccggctaatttttgtatttttagtagagacagggtttcaccatattggccaggctggtcttgaactcctgaccttgtgatccacccacctcggcctcccaaagtgctgggattacaggcgtgagccaccacacccgtcttttttgtatttttagtagagactgcgtttcatcatgttggtcaggctggtcttgaactcctgaccttgtctgcgtgccttcgcctcctaaagtgctgggattacaggtgtgagccactgtgcctggccccttcttgctttctatcattctttatctcagccccaaagtcactctgtctcttactcttcccaggggcccattgtgctgggcagacgacaaaaagctttggggaagaaccgcagtgctgatttcaaccctgatttcgttttcactgagaaggaggggacgtacgatggcagctgggccctggctgatgtcatgagccaactcaagaagaaggtgagactgacagtgatggacagctccagactttgggctattaagattggactgtgagtttcagggcctagccctgacctgactgaccatctgtttacattcagcagatactacaactcctttgaaaataactggttaaaaaaaaacaaaagaaaatatctggtatacttttgatgagatgggcacagggatcacaaatgactcactgtcttttttttttttttttttctgagtctgcttgctggggagactcctctttaataccaaacaaagtatgagcacttgccaggtggtctccggtggtgtcactgtgcagtgtccctggttcccacacagcacagccaaagctaccacagatgtcattgtcatctgtttgtttgccaagatcccatgcctttctgtgaatctggttaaactagaagatgcatctaagttattttccatttcatgtcttcaaagagaaatattgcctgtccagaacagtttaatccaggctttgctggtccttactctgattgaagtaaaccagcattgccttttctttttttttttgagacagagtctctctccattgcttaggctggagtgtaatggcgccatctcagctcactgcaacctctgcctcctgggtttaagcgattcttgtgctttagcctcccgagttgctgggattacaggtgcccaccaccacgcccagctaattttttgtagtttttttttgttgtttttgagatggagtctcactctatcacccaggccggagtgcaatggtaccatcttgactcactgcaacctctgcctcctgggttcaagcgattctcctgcctcagcctcttgagtagctgggattacaggcatgagccactgtgctcagccttaccagcactgcattttcaagatcgtctggagaggattaaaaaaatttttttttttgagacggagttttgctcttgttgcccaggctggagtgcaatggcgtgatctcggctcactgccacctccgcctcccaggttcaagcaattctcttgcctcagcctcccgagtagctgggattacaggcatgcaccaccacacccggctaattttgtatttttttagtagagacagggtttctccatgttgaggctggtctcgaactcctgacctcaggtgatctacccacctcggcctcccaaagtgctgggattacaggcgtgagccaccgcgcccggcctaaaatttttatatatataatatgtatatgtattttcagagaaggccaaaattttttctttttcaagttaattatgaagagtttgttctcttattcgatgtttcaatgaaaatttctttttcacctctttatttttatctgcagagggcagccactacattagatgagaagattgagaaagttcgaaagaaaaggaaaacagaggtgagaagaaaagtggctatttttcgttgttagggcccactctttactctcaccacgaccccagcatctctctggaagcccttatagagcggggcatggctggggcaggcgcactcttctgtgtgtttgctgtgaatctgtactgagaatccccacagccgttcattcaggccggagagcttcctatcgctctacttaggttctggatttctagaagtttctcatcaccctcactttaatttttttcccaggataaagaagccaagtctgggaagttggaaaaggagaaagaagcaaaggaaggctctgaaccaaaggagcaggaagaccttcaagagaatgatgaggaaggctcagaagatgaagcctcggagactgactactcatcagctgatgagaacatcctcaccaaagcaggtagacgttacggcggaggtgtcagtaatggggacaggagatcagaaggcatcctcctttactttgtagggtttcctccactcttctgcacagtttatctttaagctgttctgcctactacattgaactcctttctttcttttttttttttttttaagagatgttggctgggtgcagtggctcatgcctgtaatcccagtactttgggaggctgaggtgggtgtatcgcttgaagccaggagtttgagaccagcctgggcaacatggtaaaaccccatctctactgaaaatacaaaaataagcttggtgtagtggcatgcacctgtaatcccagccactcaggtggctgaggtacgagaatcacttgaaactgggaggcagaggttgcagtgagctgagattgtcccactgaacttaaccctgggccacagaatgagaccctgtctcaaaaaacaaaacaaaagagatgtggtctcactccatccacaggctggagtgcagtagtgcaatcatacctcactggaaggcttgaactcactggcttaagtgatcctcctgctttagcttcctaagtagctgggcctacaggtgcatgcccctgcgcctggctaattttttttttttgtagggacggggtcttgctttgttgctcaggctagtctcaaatttctaggctcgagcagtcctcccgccttgacctctaaaagtgctggcattacaggcgtgagccactgtgcccgctgaatcctttcttttaggttttcttttctcttgggattttgtttgggttgttgtacttcataggtagtttactcttttcccatctagccccatgcggctgccagatgccactgtgatacaaactcatttggggtgacatactcagatgggtccagccacatagtgggtgctcaataagtatttctttctttctttttttttttttgagatggagtcttactctgtcactcaggctggagtgcaagtggtacaatttcagctcactgcaacctctgcctcccgggtgcaagcaactctcctgtctcagcctcccaagtagctgggactacaggcacacgccaacacacctggctaatttttgtatttttagtagagatggggtttcaccatgttggacaggctggtcccgaactcctgacctcaggtgatccacctgcctcggcctcctaaagtgctgggattttaggcgggagccactgcttccgccctcaataagtatttcttgcagaaatgtgtgctaaagcatcataatacagtgtagtggtcgagagcctggtctctggaccagagtcactgggttagctttctctctgaccttaggcaagttacttcaccatgctgccacaaagtgtcctcatctgtgaaacaaggttgacgatggtcacccctcagaggctgaagtgtggcattggcacttaggacagtgtccagcaggatgcaagtgctttgtaagtctgagccgtggtcatcagctaagtttttctccatagatacactcaaagtaaaggatcggaagaagaagaagaagaaaggacaggtgagcttggggctgcaagacagtatgcagcttgttggcaaaccgaaaggagtttaaggtcgtttgggtttcttggctctttttgttgaattctcttctctcttttggttttctggtgtaggaagcaggaggattttttgaagatgcatctcagtacgatgaaaacctctcgttccaggacatgaacctttcccgccctcttctgaaggtagcagcttcttgtcaaaaattttctttgtagaagcatggtcttgctatgttgtccaagatggtctcaaattcctggcatcaagcaatcctcttgcctcaacctcccagagtgctgggatttgagccactgtgcctggccagtagtggcttattttggcaaccatgggattattgcagccacccctaactggactttctgcttctctctttgcctccctcaactcttgtccatacagttgccagagaactcccttttttttttttttttttttgagacggagtctcactctgtcgcccaggctggagtgcagtggcacaatctcggctcactgcaacctccacctcccgggttcacgccattctcctgcctcagcctccccagcagctgggactacaggcacacgctgccacgccctgctaattttttgtatttttagtagagatggggtttcaccgtgttagccaggatggtctcgatctcctgacctcgtgatccgcccgcctcagcctcccaaagtgctgggactacaggcgtgagccaccgcgcccggccgagaactctcttaagcaatgagttccatcgtgtccctcctcttcttctctgagtccttcagtacttcccagtctcactcttcttagaagcctgagtccttatattgacctacaaggctctgccccttctggccctctctgacgacacctcctggcactcgttctgctctggccacactggcctccttgctggccctcaaataggttaggcctcctcttcctcagggcccttgcactttctgttccctctgcctggaaaactcttccagaaatcttttggggtgctctctagcttccttcagggttcaactcagtatcccttgctcagtgagaccttccctggcagccctaccgtgaatagcactccccctgctgcccgtctggccgctgcattgttttccgcagcatctctccatatgacatgtgtttgttttttggtctgtttctaccagactgtaagattcctgagggcagggtttttatttcttttatttactgctgtgtcctcagtgtctagagcaccacctcacacatagtaggcgttcagtgaatgtttgtggaacgaatgattggtggggattggtgtggtccccacttgtctggaaacctgccctgtttgtgttgtgctgagacttcccccgctcaaccctgtctgacccagttcttttttcctcaggccattacagccatgggcttcaagcagcccaccccgatccagaaggcgtgcatacctgtgggtctattggggaaggacatctgtgcctgtgcagccactgggacaggtgaaaaggatagggacccagggtgggcagaagggtgttacggccagggctgggctctaggttgacttaccaaaggctggtttgctaaataaatattcttggttttttgaactatttcatttttattttttattttgtagagataggggtctcactttgttgtccaggctggtcttgaattcctaggttcaggttcaagcgatcgattttcccatcttggcctcccaaagttctgggattacaggcatgagccactgtgcctggccataaaatttttgtaacacaaaaaagatatactggtgcaattgagagagtaaaggactttttttttttttttttttttttgagacggagtctcgctctgtcgcccaggctggagtgcagtggcgggatctcggctcactgcaagctccgcctcccgggttcacgccattctcctgcctcagcctcccaagtagctgggactacaggcgcccgccactacgcccggctaattttttgtatttttagtagagacggggtttcaccgttttagccgggatggtcttgatctcctgacctcgtgatccgcccgccttggcctcccaaagtgctgggattacaggcgtgagccaccgcgcccggccgagagtaaaggacttttaaatttttaaccactttattttgaagtatttgtagatcagtggcaagttgcaaaaatagtgcatagggtctctcgaatccttcatcaatggtgacatcccacataactgtaggacaaaatcaaaaccaggaaattggcactgatacaacagtgtttcctagactgcagagcttactcagtttactgaaggattaattttttgttttgagatggagtctcactctgtcacccaggctggagtgcggtggcgcaatctcggctcactgcaacctctgcctcctgtgttcaggtgattctcctgcctcagcctccccagtagctgggtttacaggtgcccgccaccacacccggctgatttttgtatttttagtagagagagggtttcaccatgttggccaggctggtctcgaattcctgacctcaagtgatacacctgcctcagcctctcaagagtgctgggatttacaggtgtgagccaccgtgcctggcatactgaaggattaattttgtaagataaacagtgcatgagaggatgtccggtctagtagtgggccacaagtttcaaagggtctgatgaaggtcattttcatttaatcctcttggggtatccctgatctctgtgaccatggcctcctggccctgccatatcagaggaggaaattttttttttttttttttttgagacagagtctcgctctgttgcccaggctggagtgcagtggcgcaatcttggctcactgcaacctccgcctcccgggttcaagcgattctcctgcctcagcctcctgagtagctgggattacagatacacgccaccatgcccggctaatttttgtatttttagtagagacagggttttactatcttggccaggctggtcttgaacccctgacctcatgatccacctgcctcagcctcccaaagtgctgggattacaggcatgagccactgtgcctggctgtattttttctttttttttttgagacagagttttgctgttgtcacccaggctagagtgcagtggtgcgttctcagctcactgcaacctctgccttcaagtgaatctccttcctcagcctcctgagtagctgggattacaggtgcccaccaccaagcctggctaatttttatatatttagtagagacaggatttcaccatattggccaggctggtctcgaactcctgacctcaggtgattcgcctgccttggcctcacaaagtgctgggattacaggctcccgccaccatgcccagctaagttttttgtatttttagtagaattggggcttcactatgttggccaggctggtcttgaactcctgacctcaggtgatccgcctgcctcggcgtcccaaagtgctgggattacatatgtgagcctgaccatgtgatttgaaagcagaaaaaatattctatgaaaaataagttcctttattttccccaaccagacgtagtttttctgtgctctggtgaaaacctaaccctggagggagctaaacttcttctcattgcttccttgctgtccctccctccaggtaaaactgccgcctttgccctgcctgttttggagcgtctgatttataaaccccgccaggctccagtcacccgcgtgctggtgctagtgcccacccgagagctgggcatccaggtgcactctgtcaccagacagctggcccagttctgcaacatcaccacctgcctggctgtgggtgagtttctggccaagggctgccagcccctgagagactgtggtggggtggaggatggatgtgccccgccatctgttggtgttggtgacaggtgccaggagaggcctttgtgttgattgaatccacttaaaaactggaagacttttttttttttttttttttttgagacggaggagtctcgctctgtcgcccaggctggagtgcagtggcgcaatcttggctcactgcaagctccgcctcccgggttcacgccattctcctgcctcagcctccccagtagctgggactaccgccaccacgcctggctaattttttgtatttttagtagagacaggttttcaccgtgttagccaggatagtctcgatctcctgacctcgtgatccgcctgccttggcctcccaaagtgctggaattacaggcatgagccaccgcacccagccgacatgttttcatagtgctttaggtgggtgggatttgattgagacttaaccaaccttcacaaatgaaacctgaaaactatgaacatttttttcgtggtactgaacaaatttggggtataatttctgctctgtgagaataatgaatcaaatattactttgggcagcgtttttccaatgaagttatatgatagtgttatctagcctgcattttgccctccttgtgctattggaagtcagaagtgatctttgtctccctgtaacagacacctcatcactttcctcagctgcttctcttagtccttgaatgtttcaggcattctcttttttttttttttttgagaggaagtctcactctgttgcccaggtgggaatgcaatggcatgatcttggctcactgcaacctccacctcctgggttcaagtgattctcccactgctttccaagtagctggaattataggtgtgcaccaccatgcacagctaatttatgtatttttaatagagatggggtttcgccatgttgggtaggctggtctcgaattcctgacctgaggtgatccacctgccttggcctcccaaagtgctgggattgattacaggcatgagccacctcgcccagcccatgcattctcttctgaagtgcttttgtgtcatcatcattgttgatttttgcacttagcacaattttaatgacatgatctgtctttcccagtgcgtttctgggaaacccatgtgcttgggcctttgtcagtcttactctctcagtggttttctctgcatctggcctgaggcctggtgagtggctggtgctcagtcaacacccatgagcagctgacctggccgcctggtggggctctcttctctttgcaggcggcttggatgtgaagtctcaggaagcagctcttcgggcagcgcctgacatcctcatcgccaccccaggccggctcatcgatcacctccacaactgcccttccttccacctgagcagcatcgaggtgctcatcctggacgaggctgacaggtgctcctcacagcctggggcccagggcactgtggggttccaaggcccagaacctggatgtggacctgccacactgcgttattctttgtggctctgggccatggctgttggtgtgcgataccagatcagccacttgtgctggggcctctgcccagccttagcccatgttttcctcttttttctctttctctattatggtggttaagtgataaggctggtcaaatgttggtcctgccacttcctaagggagatttggaaatatttagattctcaaaacaaatcttttctcatttgtaaatgggagataaggacatacgcacaccatagtgttgaggagctgaggagggaggaagaggaagtgccagcgtggctcccacagggcctctgtgactgcagtggggactccctctccccccaccccgccccccagctctctgttcctctctgtgccatctgctcacctctttgctctgggactgaacagaaggaactcttcctgaactctggactgaggctggaggtggggcaggggaaggagctcgcagacagccccagggcatgctaaggttgcaggcccttaatccctgactcttcaccagcttggggaatggcagctccatccttccagctgttctgaattcttagcgtgtcctcctgttttcacattccacagcccgcctgtcgacacagcctggccacacgcccccactttgtggcttctgcatttgccatttcctcagcctggagccatctcctgccccttcaggtttctgttccagttgttatcttgttagtggggcctttgctggctgccctgtgacggtcctgccctgacttgctcctcccgtcctgcctgcattgtcactgagggttcatggagtgccaagtccccctctctccctaggatacagtattcatgaaggggctactgctatactcccatgaacaagggcatgtctagtatatagcaggcgctcagtaaatacttgttgaataaccaattggctgactcccccagaacagaagacccattcctgaggcctaaaggatgaaaaagagatcattttaagccaaggggatgtgatctggtttaggttttaaagggggagggaaactattcaagtatgtacctcaaaagaccaaaaaaggcggaggaagtatttgagatttagatcaggagacagctctgtgtgatacctggacctagactgtagcctgcactggggagagaaatgctgtaaggggttgggcttgctgaaaacatggaatccaaggaatctcacagattactattatgtataaagagaaagaggatcctttacagtggcgtgatctggcagacactatagccaagtgaccaacctcacatccacagttctggaacaaaccggccgtcagtatctcatgatggagcgtgaatgcagggcacagctgtgcccagcagcgctgtccccatgaggatttctctgaatccagttactgagaaataattatacgaatccagactgtgagaaggatgaggggccttttcgttccttttttttttttttttgagtcagggtcttgctttgtcacccaggctggagtgccatggtgtgaacaccagctcattgcagcctctacttcctagactcaggtgatcctcccatctcagtcccccgacgtagctactactacaggcacatgctaccatgcctggcttattttatattaaataaatagagacggggtctcgctatgttgtcaaggctggtcttgaactcctgggcttaagacacccttctgcctcggcttcccaaagttttgggattataggcatgagccaccttgcccggccccagctcatttttgtattttttgtggagatgaggttttgctatgctgcccaggctgagggggcttttctagatgcaggaagactagagacgtggcagccagttgcaaggcaggaactttggttcttgcactaaaacaaaaggtaactataaaataaaacttggcctggcgtagtggctcatgcctataaccccagcactttgggaggccgaggcaggcggatcacctgaggtagggagttcaagaccagcctgaccaacatggagaaaccccatctctactaaaaatacaaaattagccgggtgcggtggctcacgcctgtaatcccagcactttgggaggccaaggcaggcggatcatgaggtcaggagattgagaccatcctggctaacacagtgaaaccctgtctctactaaaaatacaaaaatattagccgggtgtggtggcgggcgcctgtggtcccagctactccggaggctgaggcaggagaatggcgtgaacctgggaggcggagcttgcagtgagcggagatcgcgccactgcactccatcctgggcgacagagcgagactccgtctcaaaaaaaaaaaaaaaaaaaaaaaaaaattaagtgggtgtggtggtgcatgcctgtaatcccagctattcaggaggctgaggcgggagaatcgcttgaacccgggaggccgagattgtgccattgcactccagcctgggcaacaagagtgaaactccatctcaaaaaaaaaaaaaaaaagacacttggaacctggaggcagctgaaggaatttgaacgtggcctgtgctttagatattcacgcacttgaaagtcttgggtgtgttgatgaagttgtgtttctgtaagagaaggtcctagtgcttaggagttgtgtgctgaaatatttggggtaaggtgttataacatctgtgactgacttgccacaaaaagacaaagcaaatgtggcaaaatgataattcttggtgaaaagataaaataataaaatagatgagtcctaaatgtaaccaatgacaacaaacagcagccggtatgcaatcccgtgtccctcactgtgaccgaagagcactctctccatttctgccatgtctttctctgctcccaggatgctggatgagtactttgaggagcagatgaaggagatcatccgaatgtgttcccaccaccgccagaccatgctcttctcggccaccatgacagacgaggtgggccgagggacttctctgtggcgggtggcaggtgtgcccagagggggccatgcagaggaccctggctgggcttgagggggtttgcctggggtgagcactgcttcctccttccctaccaccttgcagagagctgaggaaacctggctttgtgcttggcaggtgaaagatctggcttctgtctccttgaagaatcctgtccggatatttgtgaacagcaacacagatgtggctcccttcctgcggcaggagttcatccggatccggcctaatcgtgaaggagaccgggaagccatcgtggcaggtggcagcacagggcaagcctgggcagggtgggctggtcagcttccttgagctcgtagtatccatgctgaagtgcttggtttcccctgcgcctctgccgtccagtcttccccagcgcagaggctgcactgcactaatgatgatccgctgcctctcttctccacgggtccttcctccctttgctttatcgcctcaccaatcctctttgtgtcctgttcaactcccaaccacttggcatcagctgctgttgtacccgtcagtccagaccactgttctctgtcgcctggatcgttgcgcagcctcttgctcgagctccctgcttccactcggccttttgtgactctctgcattgcagagcatttacaatgattgcttgcagaagacattcgtacttattatgtccttatttgaacaccctgcggtggcttccattggtcttagactaaaatccaaacatcttagttttttaggactcttcgggcctggcccttgcctgcccgggatcccagccttggaggcttgctcatggctccagccacattcgcctgcttgcacttttttttttttttctttgaggcagagtcttgctctgtcgcccaggctggagtacactggcacgatcttggctcaatgcagcctttgcctcctgggttcaaacgattctcctgcctcagcctcccgagtagctgggattacaggcacttgccaccacttctggctaatttttgtatttttagtagagatggggtttcaccgtgtttgccaggctggtcttgaactcctggcttcaagtgatctgtcctccttggtctcccaaagtgctgggattacgggcatgagccactacatccagccgcctgcttgcacttctcactataagctggttcctgcctccgggccttcatgtttgccatttcctctgtctagaatcttcccctggatcttcccatggatcatctgccttgtcattcaacctaatgtcacctcttcagagaggccagcccttagctgcttccccctcgtccctgcactctctctcacagcatttttcaccccccaggaattggcttctctgtatccaccctggaatttgagttccacaggacagggacagtgcctgtctatccagtgccaggcacagtgaccatactttgtggatgaggagggggtacatgttgaataagagcctagaaacagctgccagctcagtcctctcttcctgccagctttgttgacgaggaccttcactgaccatgtgatgctgttcacgcaaaccaagaagcaggcccaccgcatgcacatcctcctggggctcatggggctgcaggtgggtgagctccatggcaacttgtcacagacgcagcggctggaggccctccggtaacatttggggtggggactgaggctcccaccatccttctggggcagagaggatagaaggaagaagaggaccctgagcattctattagaacattagcaggggacacatagcatgatcttggccttgaacattttaacctaaccactgtgaggtcatgtcttagatgtgtttagaactctaacttcatagtcagagatgaccctcatgtccttggatgcttgtccctagcatgggagctgttgtgtggcgtgacagaggaagctggcttggaaaggcaacacatggtctcttcttggaagctttctgagagtggtgaacattcctgggtctgattgaacaagatttagagtcaaagttagcagccattacttgagcatctactttgccaggcactgtgctgcgtgctttccatgtgatttcttgtttagtcctcagagaatggcatcaaggtggttggcaaggaggaaccctttagaactctccacctaaccctgttcatcagtgggtgctgaaaggtgtttgttaaagataggctgatttaaactgagacaattgcctatgctgttagcagatacagaactacgtttgctctgtatgatgggttgttgaagggtgggtgtaaatatcccatgtgctcacatttagaatctatccctatttttttttttttttgagacggagtctcgctctgtcgcccaggctggagtgcagtggcgcaatcttggcttactgcaagctccgcctcccaggttcacgccattctcctgcctcagcctcccaagtagctgggactacaggcgcccgccaccatgcctggctaattttttgtatttttagtagagacggggtttcaccgtgttagcgaggatggtctcgatctcctgacctcgtgatctgcccacctcggcctcccaaagtgctgggattacaggcgtgagccaccgtgcccagcctctatccccattttaatgccctgttctgtcctctgctggctcaggctcttgtggagcattattaggggagggtgtctggatgaacagctgtttgtgactgtttctaggcgttttaaggatgaacagattgacatcctcgtggccactgatgtggcagcccgtggacttgacattgagggggtcaaaacggtgagcagacactatcttccttggacttttggtggaagtctttttgcctcttcgcaccccccttcccttgccaggcctgacgttcatttttgaccttctaggtaatcaacttcacaatgcctaataccatcaaacattatgtccaccgggtggggcgaacagcacgtgctggcagggctgggcgctcagtctctctggtgggagaagatgagcggaagatgctgaaggagattgtaaaagctgccaaggcccctgtgaaggccaggatacttccccaaggtgagcaggcacccctgtggcagtgcagaatggctcggtgggcggggcaaggacagagtgtaatggctgagagcaggtactttgcagttcagagccagatttgaattccagccctgctgcttccttgccgagtgaccatgtgcaggtttcacctcacctctctgagcttgcctcctgtgtgtagaagggaattatgacagaattgtaaacacagtgccccatttaggtggaaattgagaagagaaggttgcttggggcaaaattctcactaaactcctctttcccttactgttggtggtggggaagagagagatcagtactcattctttttgggtcctttcattgattttgttcctctgatctgtgggggtcttataaagcacatcctctttaaagtctttttttgttttgttttgttcttgaattcctaggctcaagcaatccacccaccttctgcctcccaaagtgccgggattaacagtaatgagccaccatgcccagccttaaaaatttttaaagttataaaaataatacatatttagcctgagcatggtagctcttgcctataacccagcactttgggaggccaaggcaggaggattgctagaggccaggagttcaagaccaacctgagcaatatagtgagctgcctgtctctaaaaaaaaaaaattagctgggcatggtggtgtgtgcctgtagtcccagctattcagaaggctgaggcaggagatctcttaaatccaggaggttgaggctgcagtgagctatgattgtgccactgcactgcagcctgggcaaaagtgcaagaccctgtctctaaaaaatgaaatgaaaagtacgtatttattgttggaaattagtaaataaaaaaaaatgtaattctgtgtcaaagagctcaccactggtagcatttaggtgtatgtcttttcaaaccatttttcctttcttaaatgtcccttttatttttttcattttcattgtcttcatttaatcagcgactagttattgagtcctgctgtgggcctagtgctattgattctgttctaggtgctggggatacagcagggaacaaagcagagctgtggttctgggagaaagagacaataaataagctaacagtagatgtgattgagaacagcaggaggagactgcctcattaagctgttaaggaaaggcctctgcacagctggcattggagctgagtcctgggtgatcggaatgaggcagccatgagaggtctgagggcaaagtgctgagctgagagaacaagggtggaggctgtgaggtaggaacgagcttagtgtgtgagaacaagagaaaggtcaggaggctcaggcgtggtgagcagggacacacagaagatcagagcggtaggcaggggccactctgagtctgggggatatgaagcagagaaggcacacattacagacaccatttcctatgtcagtaaatgcacagctaaattattttcatcagttacacagtattagtagtcacccttattttattttatttaatttatttttgagatggagtcttgctctgttgccaggctggagtgcagtggtgcgatctcggcccattgcaacctctgcgtcccgggttcaagtgatcctcctgcctcagcctcccaagtagctgggactacaggtgcatgccaccacgcccagctaatttttatatttttagtacaggtggggtttcaccatgttgtccaggatggtctcgatctcttgacctcgtgatccacccgccttggcctcccaaagtgctgggattacaggcttgagccactgccttattttgtttaagataaggtcttgctttgttgcccaggctggggtacaggggtgcgatcatagcttactgttgcctcgaactcctgggttcaagcagttcttctcctcagcctcctgagtaggtgggactacaggtgtgtgccaccatgatggctaattttttttttttttttagatggagtctcgctcttttgcccaggctggagtgtagtggtgtcatcttggcttactgcagcctccgcctcgtgggttcaagcagttctcctgcctcagccttctgagtagtagctgggattacaggcgtgtgcccccacacccagctgatttttgtatttttaatagagacggggtttcacagcattggccaagctggtctcaaactcctgacctcaggtgatccacctgccttggcctcccaaagcgtgggattacaggcatgagccactgtgcctggctttttttttttttttttttttttttgtagagacagagtctggccacgttgcccaggctggcctcaaattcctgggctcaagcaatcctcccacctcaatctcccagagtgccgggttacaggtgtgagccaccatgcctggcctacccttatttgtaaatcctttttattttctcccattgagatgtcatcctcaaattccgggacaagattgagaaaatggagaaagatgtgtatgcagttctgcagctagaggcggaggaaaaagagatgcagcagtcagaagcccaggtgaggctgcgaggcgggatcttgttcacaaggctgctcagtaagcaagctgctgcatccctgctggtgctgcccttctgaaatgtttctcccatcagagccccaggcatttgcagcccgtggcttcctgtgttagtagatacgggtttcacggcaggcatccttttgttatctctacagatcaatacagcaaagcggctcctggagaaggggaaggaggcagtggtccaagagcccgagaggagctggttccagaccaaagaagagaggaagaaggagaaaagtaagtcagggaggttccgcagaaatctaaatacagaattaccccacaggactcagcagttccatttcctagttctatactgtaaagcagcggtccccaacctttcggcaccaaggaccagtatcgtggaagacaatgtttccacatttggggtgtgggggttgcattagattctcataaggagtgcacaccctagatccctcgcatgcgcacttcacaatagggttagtgctcttatgagaatctaatgctgctgctgatctgacaggaggccaagcacaggtggcaatgcttggttgcccaatgctcacgtcctgctgtgcagcctggttcctaatacgccatggactggaaccggtatgcagcctggggttggggaccactgttgtaaaggatgtaaacagggactcaaacagatacttagatgccagtgctctttgaattactgttcataatagcaaaaaggtggaaacaaactatgttcatcaacaagtgaatggataaacaaaatttggggtgtgtgtttatatacacacaatggaatattattcagccatgaagttctgatacatgccataaggatgaaccttgaaaatcttaagctgaatgaaataatccagacacaaagggacaaatactgtctgatttcacttacctgagatatctagctaggcaaattcacagagacagaaatagattatagattacttagggctaggggaaggggggttataggaaattattagtggttgcagagcttctgttttcaatgatgtcagtgagtagcctcctgataggagttttggaaacagatagtggtgatggttgtacaatgttgtgaatgtaagtaatgccactgaattgtatacttaagattgggtaaaatggcagcctttgttttatatgtgtatatataaccacaataaaaataattttaaaaaagttaggagatatttaatacagatttcctctccatctccctttaaaaaagacccaaaacacttataagttcacattgttctatgcctcgccttttcacttaattttgaagcttagagatatgttttatataggcccacatatgctgccctttttgttttttgttttcagacggagtcttgctctgtcactgaggctggagtgcagtggcgcaatctcggctcactgcaagctctgcctcctgggttcaccccattctcctgcctcagcctcctgagtagctgggactacaggtgcctgccaccgcacctgggtaattttttgtatttttagtagagatgggatttcaccgtgttagccaggatggtctcgatctcctgacctcgtgatccgcctgccttggcctcccaaagtgctgggattacaggtgtgagccactgcactcggccccctttttgttttttttaatggcttcatgttcttccatcatatgagtagattgttgagggacattgaggttgtttacaatcatttgtcatccagcctgggcagcatggcaaaaccccatctctactaaaaatcaaaaaattagccagacatggtggtgcatgcctatagtccaactacttgagaggctgaggtaggaggatcacctgagcctggggaggtcaaggttgcagtgagctaagattctgccactgaactgcagcctgggcggcagaatgagaccccgactcaaaccaccaccaccaacaacaaaaaacccaaaaaataatcatttgtcattacaaacaagtgatgtagggaataaccttgcacatatgcccttttacaattaagcaagtgtatatttggcttgcaggattaattcctaaaagtggaatagtgggtcagaggatatttgtatttctagttttgttagaggttgcaaaatttccctcctagagggtataccagcagttttagaaatgctgtctatatttgatgggacaaaataagggtgtatataacttaaatttctgataaaaatagagttataactgtattggtgggtaaagtagtaaagtgacctaaatcttcatccttcatagcaggaggtttgtaatgagtatcttaagtggattgagaaatagtcaaaaaagcatgttatttagtgagatggaggtaatcagtggaagaagtgcttgcggcttttcttttcttttttttttttgaggcagggtctcgctctgtcgcccaggctggagtgcagtggcgcgatctcagctcactgcagcctccccttcctaagttcaagcaattctctcacctcagcctcccaagtagctgggattacaggtgcaccaccatgcccagctaatttttgtatttttagtagtcggggtttcaccatgttggccatgctgatcccaaactcctgacctcaggtgatccacccacctcagcctcccaaagtgctgagactacaggcacgagctactgcactcggccaagaagtgcttgccgcttttcattttaatctgctaacttaccaattgaaaacgtgcacttcttatcgtaagcttaaaaaaagataaaatcatccctgaaatcttatgctttcttctcatcccagttgccaaagctctgcaggaatttgacttggccttaagaggaaagaagaaaaggaagaagtttatgaaggatgccaaaaaaaagggggagatgacagtgagtggcctcccttttggagtttgggcccactcggtggggtgggtcagagtggcctggtgtgttccacactcacacctccccactccccctaggcagaggaaaggtctcagtttgaaatcctcaaggcgcagatgtttgctgaacggctagcgaagaggaatcgcagagccaagcgggcccgagcaatgcccgaggaggagccagtgagaggtcctggtaggtgaatggggagcccaaaggagcttgtacaaggttttccctgaaacctgtgctttgggtcagggagaaaatctgagggatgatgacagtagcccacattatttgagtaattagtatgtaccaatgtgtacagctatccctccacggtctaaggggcgcagtgaccttgtggttgttgagaactaggatttgaacgccagcttttctgactccggagcctaaggcctcaccagctgctacttggaggagctggtgaggacagaatgaaaatagtctttggatgccagagtatccactgaacttggaatcattaccttgaacttaaggggatttaggagcttgggccaaagacaaccatatgtaacccattctctctgtgcacagccaagaagcaaaagcaggggaagaaatctgtatttgatgaagaactcaccaacacaagcaagaaggccctgaaacagtatcgagctgggtaggattttaagtcatcatggagcccttggtattctttttttttttttttttttttttgagacggagtctcgctctgtcgcccagggtggagtgcagtggtgcatcttagctcactgcaagctccacctcctgggttcaagcaattctcctgcctcagtctcccaagaagctgggactataggcgcacgccaccatgcccaactaatttttgtatttttagtagagatggggtttcaccatgtttgccaggatggtctcgatctcttgacctcctgatccacccgcctcagcctcccaaagtgctgggattacaggcttgagccaccgtgcccggcgagcccttggtattctaatggaagctatgagtcttctgcctccttccccatttccagtttttgcacacctatagctttatactatgtaaattcaagggtacctgtctgttctccaccccccacccctctcagagccacctgaggatcccaaggtgagaacaggagaggggtgttcagttagcactgttcctgccttggaggtgaaatagtacattgttgggttcagaaatggagctttccttcaggggagtgataactctttcatctcaagttccatcctgcagaaccccagagaatcctggcttgctcttaggaatatgttgtcccacaccattttccccagcccaaggttggggcaggggcagactaagcttcccaagtagtggtatatacctaagaagggcctcttccaaccttgttttaaaattgggccctgacttccagaaacacgttatcaggtggaaacacataaaggcttagaacttagggcctgaaaatgatgcatcccagagatgctactgcttcatgtaggagctggggagggtgggggtgagacaacacccatttgttcaacagtttgctcatttcagcatgtcatcttctctcacagcccttcctttgaagaaaggaaacagttgggcttgccccaccagagacgaggaggaaactttaaatctaaatccaggtgatactggctgttttggaggggcataggttttgggattagagataaaaacctttcatggaaaagaagcttctccatcctcattctggtcttaactctgattttcttacagatacaagaggaggaagtagctgtcgtggcctgaagaaattcatgggggcagcccttaaatcccttccctgtgggaagtcatcctggctggtctgtcttttctccatttgtttaaaaaaaaaacaaaaacaaaaaacaacactttggtgtggtggtatggtacgtagctattttcctaagcatgtctgtcaatctcccttcttgctgattagctttcatatgactatattaaatggaagtatttttgggaaaagagaaaccaatccaagtgtatatcttattactatctcttcctcaatggcaaatgtgcccacagtctactagcttggtatcaccacatacagttggtatgcataatctttatgcttgtagaggaacagggtatggagtgaggaaattcttggtagaagttctcttctagcctggggaacataacaagaccctgtctcttaaaaaaaaacaacaacaacagaaaagttctcttctgttgatactctagaactaagagctaaatgatagctgaagaagatagctaaatgataactcttagttctaaaacatcaacaggggagaactttagcatgaatgccaaccatgcaccagatattctgtgtgctgaatagaatccagtcaactcactgcactcctgtgaggcaggcagtgatatcctcattttccaataaacagaggcttggaaagactaactttccagagttgcacagctgggaattcaggttttcaaccaacatctacttgaaccctcaccttacctcttgctgctgtgctgtggaaatgctgctggagaaatggaagcccgaaaaggacagaaggagccttgacaccataaattagttacttgctgcaaaaaccagagtctcttgtcctccaggctggagtgcaatgacacgatcttggctcattgcaacctccacctcccgggttcaagcgaatctcctgcctcagcctcccaaataccggtgattacaggtgcccgctaccatgcctggctaatttttgtatttttaggagagacagggtttcaccatgttggccaggctggtcttgaactcctgacctcaggtgatccaccacctcagcctcccaaagtgctgggattacaggcttgaaccactgtacctggccaaaaaccagttttgatcctgtaagaacgtcggttctcatccttttctgactcagaatgagatgaaagctgtggggccccacctggaaaactgtatagtttgttataatttcagggagtacttaccaccctacccccagcttaaaaattataagttatccagtagcacataccctagatactaaagagtgtgttcaaagctattcattcaggctgcacctaagtcaccaacagagggtccaattcagaaaatgatggcacaactgtgtgatggagtacagttcagactactgtcttactggattttacagaaagtaggttattaggctaaaaaagccaagtgcagaactgtgtactttttcttttccttttcctttttttgaagcagggtctcactcttgcccaggctggagtgcagtggcttcactgctcactgcaacctcgacctccccaggctcaggtgatcctcctacctcagcctttggagtagctaggactacaagtgcaagcaacaacacctggcttatttttgtatttttttttttgtggagatggtttcgccctgttgcccaggctggtcttgaactcctgggctcaggccatctgcccaatgtggcctcccaaagtgctgggattacagatgtgagccaccatgcctggcctaagggatgtgtattgcatgtgcataagttctctctgggaggactcaggaagttaacagggtttgcctctggagaaagaaacttcaggtatacccttttgtacaggctgaaaaaatgttctttttaccgtgggtaaaaatgattcattcaccagctaaataaaaatcctgtatcacaaaaacaaaatcacagcctcactgtagacagtgccttccctgtgcccgtcttcactgtctttggctgagttgcttctgaaaattgaggatacacgtggaccactgattttctcaatcattgtttttaattggctttataagctaaagtgcatagtaaagacaaaaaaaggaaatgcatacataggaaagggacacttagaaaggacctgagatacctaaatgtctgttctaaggaacactggaaggagggaatgcagatgcaggcagcaggcctgggtctggcttctggcctgggtttggagcctgcagaagctgctggcatgctagctctacccagggaacagctccaagagggagtgttgggatgaaggatcacacttgggataggtgctgctggtaccaaatgtgattttagctccattcagggcccaggggtaaccagcagtgccaccaaacctgtcagcaggtaaagaaacttctaccatcccaaagtgcaggttacaggaaaggggtcactccttaatgacgacctgggcctgctgcataaggcccatcttatgcagcatgtgggctgtcccatcttccccactctcagtgactatgtaactgtgtcagggtgagttggtgcagtcttttgtcttatcacgtgcctccatctcctggaggcagggtgcccaaggagggcagggaggggttcttgtgctcctttaagggataagcagttcataaacaactatgggcctctgtttattatgagagttagtctgcaaattagggcctggcaattagaatcggtctgcatcaatgagctcatactctgttcctggggaacaatgtagaataaacatctgaccaagtaaagacccagagataccactaggtggccctaggtggaagccccaaacatgttccagggagtctgtccactaatttgcaggagagaaggggtgagatttgttaactttgctctcagttctggagataaagtgcttactctagcgcaggggtaaatctagaaacaaatgtgggtgagccctaaaagtggatccttaagtaggtgctaagactaaaaagaatgatttttttttttttgagacagagtcttgctcctgtcgcccagactggagtgcaatggcatgatctcagctcactgcaacctccgcctcctgggtttaagcgattcttctgcctcagcctcccaagtagctgggattacaggcgcccgccataacgcccagctaatttttgtatttttagtagagacggggtttcgccatgttggtcaggctggtctcgaactcctgacctcgtgatccgcctgcctcggcctcccaaagtgctgggattacaggcgtaagccactgcgcccagcctaaaaaggatgataataaaaaacaaacttcagttccttcattagggagctggccccagtcattcagtggcgagggcaaaaggcagtggtgtaccatcttcctacatcatcccctggatctcctcaaagttcatcaggttgttggccgtgtcagaccaggcagcatgctgggctccatccatttcagaagcaagctggttgcttctttccagagtatgatttgtgccaccaatcacttccttacagtcaggacacgtgcccctctccatggctcccccacaatcgccaatcacatagatatggccattgcggcacttgaaccagtgaccacgaggataacctatggcactgacaatctgcactcgctcttcctctgagatgcccaggccagagcagggaagggtggctttcagagcttccatcttttcctgcacaagttgttcatcctcttgggtgaacttacatgttttctcaaggatattctggacactatagacctctactgctatgctatctttcaccttcttctctgctatcttgtagcgggtcagaaggttcaccaggtatgtgagcctctggatttcacttcggaggtcacttagttcctggctagtgaagctcaagcgcttcttggccagccactcatggacctgttctagtcgagtcctcactcttttctcttctaagacatgcatctttttcagggaatcccacaggctggccaggtggtcatagaagctgatgtaattctcaaccagacccaggtccttcactgacagatttttctgggccagcttctcctttaacatcaggaagtcttcaggaagcagctggtggaggaggctcttcctctccagcagggccttaagccgttcctggctggttgctatttcccctgctgagccctggatcttttccttgatgatttcaatctcttctagccgctgttttatgctagttccatacctcaggtttttgcggatgggcacctggcagatagggcagactttcaatctgatggcgacttcatcatccttctgttcattcatgtagcggtctagggcttgcacctcaaagatgtggctgcagtcttccagctgcacaaagcgggcatcaggctcatcctcaaagccaaagaatatttgggtgacctcatccatgtggcagatccggcatttcttggggcatggctccccacagagaccaatgcaggggtggccacaaactagcagcttagtacaaggcacatagcatgggggtcggttgcagggctcagagcagagtttggtgcactggtagtgctggcagcgccagacacagggttccacgcagggactacacagctccccacatttcttcttgcactggctgtggacacagcggttctgacaggtccgctggcagggtgggcactcaccaatgcatggttcctggcacttgtgtgagcagataagcaggcgcttgcagggctgctgacagcgttcatggaaacgcccttcgaagcagctgtggcaggagcctgggcaaggatgcccgcagtccaagatagtgccacactttgtggtacacttgactagcagaccaccatacaggaggccttccacatgaccacattttaccggttgactgtgcccacacttgagttttatggtgaccatttctgaacacagctgcacacagtcctcaccacatgggtggctgcatctgtgcccacatctcagagacttggagcaaggctcctggcagcagaaatctgactcaggcacggaacaagggaccatttgttcatggccgcaccgaggaatggttttgggcaccttcacctgacaaggctgacactcctggaagcaaacaaggggacaccggtgcccttcctgacagatgaccttctggcatggcttcatgcattggaactccttgtgtgaagagtcataagggtggcaggcacgggtgcagacatgcccacagcccaggcggaactcgcagggcaggctgcagcctccttcgggtactttttggaagtcagaagctttggatactaaggtgtgggtttcagggtggttctggcagcagagccggagcatggggcctatttgattgttctctcgaagtgtatgaatgatcttgctccacaggggcaccttggccagcatctgcatgtttccgatgcagtacattcccttcttggctcgggacaaggccacacagatgcggttggatatctgcagaaaacccaccttgccttcttggttgctccgcactagcgagaggaggatgatgtcattctcttccccttggtatttgtccacaacatggaccctgacgccagcaaatgtcttggcaggcatcagtttgcgcaggcagaagagctgcccggtataggtagtgaggatggtgatctgggaaggcaggtattcctggcacaggaagtacttgcacagctctaccacaaagtgagcctcatgctggttctgatggcttttgccctcttggatttcctgttcaggaaagttgtgttctacaaagaaaaggttggaagacaccccctgacagggaaaagaagtgacatgttaaaaggttcactcatggcacttgtttttttcttcctctcttgacatgcactggccacttactctgctccagagagagaccttggaaagctttttgtccactcaacatcactatctttagttctttagttagtcattgtgtgcttcattttggggccacagcaagttatgaaaataaaagattatgtctctttcagttttcaagatacttgtttgatgttaatatttaaaaaagctggctgggtacagtggctcacgtctgtaatcccagcactttgagaggccgaggtgggtggatcacctgaggtcaggagtttgagaccagcctggcccacatggtgaaaccccgtctctactaaaaatacaaaaattagctgggcgtggtagtgggcgcctataatcccagctattcaggaggctgagatgggagaatagtttgaacccaggatgcagagattgcagtgagccgagatcatgccactgcactccagcctgggtgacagacagagtgagactccatctcaaaaaaaatagaaaataaaacagccatccacaatccaaccattatagctgaaagaacaagcagtgctgtgaggaggatgatgataatgacagagcagctaacttactgagcactccactgtgctgactgctttatatacattacctccttccatacagtaatgggatatggcaggagccattattcttattgtccagaagaacctgatactcagaatttatttatttattttaaaaaaagagacagtcttgctatgtgccccagcctggttttgaactcttggcctcagctgacaattttttttttttgagacagagttcactcttgttgcgtaggctgaagtacagtggcacggtcttgttggctcaccacaacctccacttcccaggttcaagcgatcctctcgcctcagcctcccaagtagctgggattacaggcgcccaccaccatgcccagttaatttttgtatttttagtagagacggggtttcaccatgttggccaggctagtctccaactcctgacctcaggtgatccacccatcttggcctccgaaagtgctgagattataggcatgagccaccacacccagccaggcacatgccaccgcacccagctaatttttgtatttttagtagagatgggatttcaccatgttggccaggatggtcttgatcccttgaccttgtgattcgcccgcctcggcctcacaaagctctgggattacaggcgtaagccaccgcgcctggccagaattcttatataacttgcttaaggttacatggctaacaggcagaattgggattaaaaaaccctggtctgtatttcaattttctcccagtaaccagcttttaaaaagctggctctactcccttctgaaggctttctttttttttttgacagggagtctctctccgctgcccagcctggagtgcagtagcatggcacgatctcagctcactgcaacctccacctcctgggttcaagcaattctcccacctcagccttctgagtagctgggattacaggtgcttgccaccatgctcagctagtttttgtattttagtagagacagggtttcaccatgttagttaggctggtctcgaactctgacctcaagtgatctgcccacctcagcttcccaaagtgctgggattacaggtgtgagccaccgcgcctggccgctgaaaagcttttttatcttgaggaaattatagcctttttaggttgctgacaccatccaagaaagatcgggtaagacagactcaccttaatcttctcatacttaagaacagatggatgattctccagatcctggtaaatgtggggggtcaaaaggcgggcaatttcagggcacatacggtgctgaaaaaacacatgcatgtcattagaaacatgggcagagcacacacggacaatttctttaaagataaggttgctgttagaaaatttagggagggccagttgtgatggcttgtatctgtaatcccatcactttgggaagccaaggcaggaggatcacttcaggtcaggatttcaagaccagcctggcaacatagtgagccctcatctctatttttctttcttttttttttttttttgagacgtgtcaccaaggctggggtgcagtggcgcaatctcagctcattgcaacctctgcctcccaggttctagtgattctcctgcctcagccttccaaaagtagctgggactacaggcatgaggcaccacgcctggctaattttttgtatttttagcagagacagtgtttcgccatgttggcgaggctggtcacgagctcctgaactcaagggatccgcccgccttggcctcccaaagtgctaggattaaggtgtgagccaccacacctggcctctatttttcttttcttttttttttttctgagacagaatctagctctattgccaggctggagtacagtggcatgatctcggctcactgcaaccaccgcctcccaggttcaagcaattctcctgcctcagcctcctgagtagctgggattacaggtgcccaccaccatgcccggctaatttttgcatttttagtagagacaggctttcaccatgttggccaggctggtctcgaactcctgacctcaggtgatctgcccaccttggcctcccaaagtgctgggattgcaggtgtgagccaccgcacctggcctctatttttcttaaaaaaaaaaaggaaagaaaatctagagagatagagattatcatttgaaaaaaataaggagaaagcataacataaacagctcctttgtccaacaaaaactcaacacggtgatcttgtggtgttttaaaacagaaaatgtaaggttgacagagtcatttcagtattaaattatttttatttatatgagacctcttttgctggcaactggcagcttcccaggagctttctcctgggcatttggtaacaacagaggcccagcttctcacctggtaattcagacggacaaagggaatgtttactttcactagccgttcaaaaagggacacctcaaggttgaagttcttggccagatcatacacgttggcactggggcgcagctgagaagagaaacatggctgaggattctctactgataaagtcatttaaccatccatacttccatccatccaaccaaccatcaaatgtttttcaagtgttgactatgtgccaggcactattctacatactcacagtttaaggattaataatgacaagggttaaggattagtagaactaaaggtgatatgacagagtgccccatggtgggttttttctagctaggcctctgaacagtgacatctgagtagacactagcatggcagaagttgccagttcttcagtcatttgaaaagcaagatccataatggggagcggaaaggacacagtgggacaccaagagcaaatgggatgaagtcagagaaataagctgaaacctgatcacataagcctttgtgggccactttaagaagcttgatttttatgcaagtgcaatgggacaccactggagggttttcagctggaaagtgatattatctatctaccttttttttaaaaaaattcactttggctcctttatgtagagtgcattaaaaggtagcaaaaatggaagcagagagactgaggagcatgctattacaatacagtccactcaagaggccatggtggactaggtaaatagcagagggaatggatgaaataaatgacgttgccactaaaatataccccaaatctaatagcatctgctcttagactgaacgtgggaggtgaagacaagaggaatcacaagaagctactaataagcttgaggactgttgaagcagaggccagggtcttcctttatgatctcacccccacggagagccagcccatcttctagggggactctcgttttacctgctggtggtccccaatcaaaatgaggtgctggcaagctttgctcaatgtggcaatggtatgggcctcaaggacttccgcagcttcttccactatgacaatcctcggctccaccttctgtaggatctggcggtatttggcagcacctcaagtgaggaaagaagagaaaggctcctctgagctgaggcacaggacccacagggccactgggcctctgggaatccacttctgtatcttccctgaacctgcatcagcgacagctggtccttatagtgttctgggtggtctccagaacattaaaactgtgttggtcactgttggagtttcaaacccagcaggagaaagtgagtgaatttcttttttctttttttttttttctttgagacagtctcactctgtcacccaggctggagtgcagtggtgcgatctcagctgactgcaacctccacctcccaggttcaagtgattcttgtgccccagcctcccgagtagccaggattacaggcacccaccactacacccagctaatttttgtatttttagtagagatgagatttcaccatgttggccaggctgattgcaaacttatgacctcaggtgatccacctgccttggcctcccaaagtgttgggattataggcgtgagccactgcgcctggcgaaagtgagtgaatttcaccaagagttctcaaaatatgggtgctttcagtagcttttcatggtattttcctctaacctaccaaagaagctcctctttacctgtccttagataatctggcaccagaagtgaacttagatgcaacaggcaaatttctccacagtttcttacctgtggttgtcattcctacaacctgggcatctttaagaatgtgcaggtcttcctggagtctcagctcggccattctttctgctgatgtgcggtactggcgttcatagctgaggatcttccggcgggtgtcagcctggtacaactgtagccagagcctggagaatgggaagaaccaaggaaagaaagccacatgctctttgagaaggtggaagaacgcccttcagtgtgcccagtgtatgaagtgaaccttggacccttggagcatagtgacaaacagagagatacattcagggacctaagaatccaaaatgcccaacaaaaagatgtgcagagtagtcaggagctaaggaaaggggtgagataaagaacaaaggttaactatgggaagaaaataagagactttaaaaactttgggaagaattctcccagctgcagcatccctgcctaatttccctcccctcctctaattctccatagagtatttattttattagtaaaactgatgatgtcactaatcgctgtaaaactttccaacggctttctactacttttttttttttttttttaaaagacggagtcttgctctgtcacccaggctggagtgcaatggcgtgatcttggctcactacaacctccacctccgggttcaagcgattctcctgcctcagcctcccgagtagctgggattataggcaccggccaccacgcccagctaattttttgtgtttttagtagagacggggtttcactgtgttagccaggatggtctcaatctcctgaccttgtgatccgcctgtctcggcctcccgaagtgctagcattaaaggcgtgagctactgcgcccggcctctcctactcttttttttttttcctgtagagatgaggtctcactatgttgcccaggctggtcttgaaccctgggcctcaagagatcctctagcctcagcctcccaaagtggtgagattacaggtgtgagtcattgtgcctgttacctctctgttcttttctgagtttttatacccatttgtaactttttatttgtggaattacgtgattaatttgttaccctggatagactccataggctccacgaaggtaataattaatttgttaccctggatagactctataagctccatgaaagtagagcaaagtgtctattctatcccatggctgtatccctatcactcagctcagtggtggtgctcaatcaataattagttaacatcgttgaaggtcttggaggtggagaatgttctaggaacagaagaggaactccctacatgggttggctagatgtggaacacagtacctataaagctgccagcgagaactgaggtccagctgccaaacatcctcgatctcgttggcctcggctgcagtcatggtgttcagtttgcgaagctcatccttcactctttttttcattttctttttctggttgcgctgggtctgcagacatcaataccaggcagggtactgtctgagcagaggcaggcttggttttaagcccaaggcaggggtcacagcacgtaagaaaaagggctggcatcactgattaatgtcaagtgtcttacattctcccaacagctcttccactgtagagtggctaaacaaggactctggagccagtttgcctggcttcaaagccctactctacctcttactaggttgtgggacctagtaaggtaaatgacctaacctctgtgtccctcagtatcaccttctataaaatgggaataataatggtatctctttataggattgttggcttgtcaggagtaaatacgtggaaagcatttatactagtactagcactagttatcattaaacatctttgaccatagcctgtttcttgttcctaaaatgcatgccatgaaagtcatgggggtggtactttcttgttgaatgctgtacaaccagtgcctagcaactggtgcttcacacaggacttggcacagtgcctgctaaaacggtcctactgccatcgtatcaacacagtacctttaacaagtggtggaaagcactgtttatgagaaagtgctctcttctggccgtcactgagtctgaggctatgagcctttagaaggctcgcaagtcagacagatgtcactaaataaagatcttcccgctgcttcaaaatgaaacaaatcaacctttcctgatgcctcctgggagagatgctgaatctgtgcttctaagaattgagatcatgactccgctcaccacatatagtgatactgaactgaactagatcaggtgcaaagccagcactcagatgaaaactgcatccaaagttgcccttgaaagttctcaaatcattggtaaggtttacaaattcttattttgaatatctaatcctcgatcatcatagttatgcatggtaaacagtgaggactactaggctccaccaaaaggagcagagggaaggctacatgaagacacctgggcattcatacaattctggctttaagagaagtgtcaaattccaggctgaatgaaggaggaatattccatccagcctggaggtctcgcttcattgcttactttaatcctctaaaatcttagtacatgttcacaaactcatttgaaatagagaaaacaacactcctgaaggcattaagtactgagaccgtgtttgacctgactcatatgtgctacattcttccacaagttctacagaagcacttggctacctgcttcctgtctttctaagttggcatttcttgccagaggccctctgaagaaccatcgtatttatatccttgggaatcactaaagccatctcataccaggggtaggctgtaatacaggtacttagctaattgtaatggtgaagtgaatatactgtatcagaagtgggggaaaacaagcggtcagaacactctcaggcctgtttcaacccaaggaagtgagtttacctgccactctcctgtggcttgctcctgtccagctgctgtcccagtgccacaatggtctagcctcatggccagaagcattttagccaactcctggtctgctccactctcttccttcttccgccgctggggcctcaccacctcttcctcctcaatcacccggtctgcttgaatcaggtcagcttcctctgcgatctctatcagcgaactctcctcctccccttcttcctcctcatccccttctgcctgggctaagagagagaaacaggcaggagagagatgaaaactctttttttttttttttttgatatggaatctcgctcttttgcccagggtggagtgcggtggtgcgatcttggctcattgcaacctctgcctcctgggttcaagtgattctccggcctcagcctcctgagtagctgggattacatgcacccaccaccacgcctggctaattttgtaggctaattttgtatttttagtagagatggggtttcaccatgttggtcaggctggtctcgaactcctgacctcgtgatctgcccgccttggcttcccaaagtgctgggattacaggcgtgagccaccgtgcctggccagagatggaaactcttgaagctaagggacagaagacggcacctgcaagagctcagatgcatgaagacattatcaagggtttatgtgattttttttttttttttgagacggagtttcactcgttgcccaggctggagtgcaatggcacaatcttggctcaccacaacctccacctcccgggttcaagcgattctcctgcctcagcctcccgagtagttggcattacaggcatgcaccaccacgcccagctaattttgtatttttagtagagacagggtttctccatgttggtcaggctggtctcgaactcccgacctcaggcctgcctcggcctcccaaagtgctgggattacaggtgtgagccactgcacccagccctatgtgattatttttgagaagagaaactaaaaggaatgagaggagagttaggaaaggcttaaggtctccttatatactttttgttacgttttacgttaaaaaatcatacgaatatatgccttttaaagaaaggttttggctgtgcgtggggcttatgcctgtatcccagcactctgggaggctgaggtgggtggatcacctgacgtcaggagttcgagaccagcctggccaacacggtgaaactctgtctttactaaaaatacaaaaattagccaagtgtggtggcgcatgcctgtatttctagctacctgggaggctgaggcaggagaatcacttgaacccaggaggtggaagttgcagtgagccgagatcgtgccattgcactccagcctgggcaacagagtgagactccatctcaaaaataaataaataaggctgggcgtggtggctcatgcctgtaatcccagcactctgggaggccgaggtgggcagatcacctgaggtcaggagctcaagaccagcctggccaacatggggaaaccccatctttactaaaaatacaaaataagctgggtgtggtgagtgtgcctgtaatcccagctacttgggaagctgaggcaggagaattgctcgaacctaggaggcagaggttgcagtgagccgagatcacaccattgcactgcagcctggtggacagagtgagactgtgagactcagtctcaaaaaaaaataaataaataaataaataaataaaataaatacacaataaataaataaaggttttacttataccaaatacatatacaatggagggcatacaatgtaaatatgtaatataaaggataataaaaatatataaaatgaatacccaagtaccttccacccaatttaagtagaaaactgacaaattttttgaagacctttgttagccttcctaacccgaattttatattactcatttcctttttaaaagataataatgttaccacatttatactgtatctaagtaacacattgtctagtatatatgtttccataacttgccttttttttttttgagactatgtctgtcactcaggctgtagtgcagcattgcagtcatggctcactgcagcctcaacctcctgagctcaagccatcctctcgcctcagccacctaagtagctgggactacaggcacgcaccaccacacccagctaaactttttcctttttttttttagtaaagacagggtctcattatgttgcccaggctggtctccaacttctgggctgaaacgatcctcctgccttgcacttgcaaagtgctgggattacatgcatgggccactatgcccggctaacttgcctttttcattcagcatgtttttgagattcatatgtgttactgtatatgctgtgtttcattccttttcactgttgtacagtatttcattatctgagttgacttaattgatccatccattgaagaaatgttgatgaacatttgagttctttctgattttctgctatgataaagtggttatgtaaatttaaatatccccagcagcagtgcatcagagtttccattgcttcaaattctcatcaacatggggttatatcaaactttaattgttgccaaactggtgtgtaagtaatagttatctcattgtggttttaattcctctagtttttaatgagcacttttcatatatctattgaacaatttcctattttgtgatgtgcctgttaaaagtcttttatctcattagctgcgcgtggtggcacttgcctgtaatgccagctacttgggaggctaaggcaggagaggagaatcgcttgaacctggaaggtggaggttgcagtgagccgagatcacaccactgcactccagcctgggcaacaagagtgaaactccatctcaaaaaaaaaaaaaaaaagtattttatctcttttccttatattaagctatttgtctttctctgattgactcatagctctttatttattctgggaattatttttaagtctcactgttctggtatttactatattctacgttaagatttgattctaggaagacatgcacttcttacctgtattctcaggtcctgctggagaaacactttgcgtgaaagaaccgacaccaagacctagccactccagcatcatggaatgcttccagtgctggaagcaaatccattcactatcctaaggaaagaagaatgatcatttgtgaggattctatgacaaccaatgtgaaggctgggtctcctcaaagaatcaaaagcagattggggcatggtagctcatgcctgtaatcccagcaatttggaaggccaaggcaggaagactgcctgagcccagaaattcaagaccagcctgggcaatacggtgagaccctatgtctttaaaaagagagaaaaaaaaaagactgggcgtggtggcttgcgcctgtaatcccaacactttgggaggctgaggcaggcggatcacctgaggtcacgagtttgagaccagcctggccaacatggtgaaaccctgtctttattaaaactacaaaaattagccaggcatagtggtgcatgcctgtagtcccagctactcaggaggttgaggcagaagaactgcttgaacccgggaggcagaggttgcagtgagtggagattgtgccactacactccggcctgggtgacaaaagcaagattctgtctcaaaaaagctgggtgtgatggcatgcacatataatcccagttacccaggaggctgaggtgggaggactgcttgagcccaggaggccgaggctgcagtgagctatgattatgccactgccctccagcctgggctcaagaccctatctcaaaagaaaaaagaatcaaaagtaattcccttaaagtttataggctgtactattcacaacagcaaagacatctaatcaacctaaatgcgcatcaatgaaggactggataaagaaaacgtggtacatatataccatggaatactatgcagccataaaaaagaatgagatcatgtcctttgcgaggacctgaatggagtttgagggcattatctttagcaaactaacacaagaacagaaaaccaaatactgcatgttctcacttataagttaaatgatgagaacacatggtcacatagaggggatcaacacactggggcctattgaagggtggaggatgggaggagggagaggagcaggaaaaataactgatgagtactaggcttaatatctaggtgatgtacaacaaaccgccatgacacaagtttttttttttttttttgagacagtcttgctctgtcgcccaggctggagtgcagtggcacgatctcggctcactgcaagctctgcctcccaggttcacaccattctcctgcctcagcctcctgagtagctgggactacaggcgcccgccaccatgcccggctaatttttttatttttttagtagagacggggtttcagcgtgttagccaggatggtctcaatctcctgacctcgtgatccgcctgcctcggcctcccaaagtgctgggattacaggcgtgagccactgcgcgcttggcctcatgacacaagtttacctacgtaacaaacctgcacacgtacccctgaacttaaaagttaaaaaaaaaattaaaaaagaaacatcatattgttaaaaaaaaaaaaagttcagaggctgtgaactggcatctccttgggcaactggaacatttaacatgacttgtatagaattttaaaaatcaaagggctgggcacggtggctcatgcctataatcccagcactttggagagccgaggtgggcgggtcacctgaggtcaggagttcaagaccagcctggcgaatgtggtgaaaccctgtctctacaaaaattagccaggcatgatggcaggtgcctgtaatcctagctactcaagaggccaaggtaagagaatcgcttgaacccgggaggcggaggttgtagtaagccaagatcgcgccattgcactgcagcctggggtgagagagtgagaactctgtctcaaaaaaaaaaaaaagaagaaaaaaaaaaaagaattaaaaaaattttccagcctattttgacaaaatcaggagctatggcagcaatgactgtttattactgaatggcaacaaatggctggagctgggttgctaccacatctgttctagtttgccacagtcctctccgcttcttaatatttcaaatctagattgcttcacttatttgtaagacctgaatgacctctgtaagcttttggtttgtaatcctgtaaatcagcaacctaatggtaacaaagctaccatttcactgggttcctagcctgccactttacagagactgtctcagttatttcttaccatatcttttgaaggtaggcattattattatccatgtttgattgctgaggatcacatgaacccaagtcacacagtcagtctgcatgactatatctatcaactcccaagttctctatctgtgctagtttgcctctggttatgattttcttcatttcatttaacaaacacttatagtacagttactaaattaataagtttacaaatatcaccttgctcatctaaataacaatcctgtaagaacaaagatctgtaagaaattgccttttttgcaaatcaatattacagatgttggcaatttcatatggttcaacttaatgcttattattatccccattttataaaaggggaaacagccacagaaaattaagtaacttgtccagagccaagctcagactaaaacccaacaggctggttcgagttttgttcctgaccagcatattcagctgcctctcatcacaaaagggaactttacacattgtggcagcatcagattatcaaacaggtaaagttttggactgatgcttctcctggaggctacctcaaagtactgaggccagagacatatttgtgtcccccaggatgacccctacctgcactggtccattcatgagactttcccagtgctggggtgagatgtacttctgcaggtactgttcccgtaggacaccacgcatggtgcactccagggtcttggctccttcatgaagctcttgctctgactccttcatctgtgtcatgatcttccaagaacagagggaaagaaatgatgaggaaatatcatcatcccccaaactcagtcctcaccttgagggaaagcaaagctaagacaggaacagtaaggagggagaataaataaatagactggtcaacaaaccaatttcccaaggcacattattgtggtcttgaaaccaaagaactagtatcggttgagtgtggtggctcatgcctgtaataccagcattttaggaggccaaggcaggtggatcacttgaggtctgtagttcaagaccagcctggccaacatggcaaaacactgtctctactaaaaatgcaaaaattagccaggcgtggtggcaggttgaatatcccttatccaaaatgcttgggactagaagtgtttcagattttggaatatttgcgtttatacttactggttgagcattgcaaatctggaaatccaaaatgtgaaataatgttgggccgggcgcggtggctcacgcctgtaatcccagcactttgggaggccgaggcgggtggaccatgaggtcaagagatcgagaccagcctggccaacatggtgaaatcttgtctctactaaaaatacaaaaattagccaggtgtgatggcgggcgcctgtaatcccagctactcaggaggctgaggcaagagaatcgcttgaacctaggaggtggaggttgcagtgagccgagattgtgccactgcactccagcctgggtgactgagcaagaccctgtctcaaaaaaagaaataatgttggcactcagaaagttttggatttggattttccaatttgagatgctcaacctacacaacagaaaaacaaacaggccaagaatactgtgggagagacttcaaggctcacaatatctgttctctctcttttccttagtaataagaactcagatttttgactgggcacattgctgcccagctaaaagatgacatttccctggtcagttggctgtacacagaggtgctgtgggtggtatgggggaaggagcgttaaggtagggtggggatgggcagtgtttccttgtcttttctccatcttggattgtgaaggcaaaggtcataccaagggattggcagaatagaatgctgaaaggaacctgggtcctccagagctttgaggagcctccaaatctaccctgggctgcctacccagaaagccactgctatcttgtttaggtccctcttgaactaccccagatatttcagagctgggacttacactcatgtaggcccttcggaggtgcatggggaggttgcggcggaattcccgcttgttcctcagctcccttagggtgaactgcttcaggatttcactgttgctccttccacccacccgcacaatgctggtcttctgacaattgtagatgcctgtggaacaaagtggagcatggcagggttgagaggagcttatgctaggttctctcaggtgagagctgtgtgtatttgggatctagtctggtcccttagagaataaacttgtgcttaaaggaaatttaccccattaatgagtgagaaggtccccgagaagatgtgacctgcagagcagtaaagtgtagcacttaaagagtacaggttctggaatcagacaactagggatccaactcttagctctaccacttattgctgtgtaacctggggcaagtgacttgagtctcagtttctctgtctgtgatttagagatggcaatatctcccatatagggctacagtctggataaatgaaagaaaatctttaaagctcctagctagggcccagcacaaagcaagcacccaggatatgttacatatttttcactctgcagatttactgattgctcatatgttttaggcatgtgccaagttctgaagatatagcagtagaaacataggcccagtttctgatttgttatcatttctttgtctctggcaggaagttactcattaaataattaatacggcagcaataaatgtagtgagtactggtagcaggggacattacctagtctgggtggggtagggatctatttttaagaatctaatatttaaactcagactctaagaataaagatttatctaggtgaaagggaggtatagaagaataaaaataaaggaaaagcatatatttattcatccattaatgttatttagtattttttgagtgcctaatatgtgccaggatatgtgaatacagcaagaaaaggaccaatcctcatctagggtagcgatacataaaatagattataaaaaaataaaaaatgcaaaagagacttcactttggggctatagaaaaagtccacctgagaagagagatttaaagtgggaccagaagaatgagtagggccaggttgagtagggccaggttgaataagctcaagatggagagggaaaaaactattccaggccagaggatggcatgggccaatggaggacgtagaggctttcaaggaactgaagataaccagtgttgctggagttagggagaacaaggttaagaagtaggagctgtggttcacagtccagctgggacagatcacaaacggccatgtaagtaatgataaggactgttgactttgtttgaagagcaatagaaagctactgaagttgctgatggttcaatcatcaacatcttgatagagaacaaatttgcctataagtattaccttccagaaactggtccaaagcatgattagtataacacacaaccaagatggggaacttctggaggctaatttgccaaacagactcgttggttaggagggcctgaacaatttttagacccacataggttttgcctagaaaataaggaaaaaggaatttaacaatttagacattttctaaataaagtaattactcagagcaaaatctttttttaaatttaatataatacattaagatagtttaaaatctaagaagcgtacattgtatattgtgaaaagtccctcttgcactctgtcacccagttctctgggtggaagcaaccaatgttaccagtttcttttgtaactttacagagacagtatatccacgcatatacaaacaatacaaatgtgtattctttttctagacttccccttttctccttaaaatatgaatagtaacagacaatttttaccattctacatcttgatttttttcacttaatgtatcttgaaggtcattctctatcaatacataggagaatcccatcccccccacccccccctttcctttttacagctgttaaggtattttttagccagttttctattgatgctgtatatattgtttccaatcttgtggcaaattagaaatactttttatatacatggtagatttgcttttgtgatgggaggggaaaacttgtagaaatcaacattggaataagagttataggctcattagtaaatggccattaattaattaattaggctaaaaactgctaaattctctctttttgtttgagatggagtttcgctcttgttgcccaggctggaatgcaatggtgtgatcttggctcaccgcaacctctgcctcccgggttcaagtgattctcctgcctcagcctcccaagtagctgggaccacaggcgcatgccaccatgcccagctaatttttgtatttttagtatagatggggtttcaccatgttgggcaggatggtcttgatctcttgacccttgtgatctgtccgccttggcctcccaaagtgctgggattacaggcgtgagccaccatgcctggcctgctaaattcttacattgtgtcaggctggtaaggtagacactgtcctcaaaaatctcaaagttgagggagggagtgatataagataatcaaagatttcactacagcaggataagtaacaatttcttccttcttttttaaggccctatgttgtccagactggagtgcaggggctatgtgtactgcagcctgaacacctgttttcaagggatcctcccatctcagcctcccaagtacttggtactacaggtactcgtcaagacgtccagctttgttacataaagttttttttttttttttttaaatcatgagttgccattacttcattggtgttttttaaagacttcttcctgtttggggttttgttttcttttggtacttcctttcggagagtaatttagcagtagctattttaactgttaatgtaaattcccacttctaataatagttatgaccccagagtagaattagagagtggcacctggggagaaaggtatgggaaggtatagttccacgacaagtacaatgtggcagataggagccaggattctacagctagactgcctgaattcaattcctaaacttgtcacttaacatttgtgtgagcttcagtacatacttcccacctcttaagaggttatttaacccttctttgccttagctttcttcatccgtataacagttttgtttttttttttgaggtggagtcttgctctgttgcccaggctagagtgcagtggagcgatctcagctcactgcaagctccgcctcctgggttcacgccattctcctgcctcagcctcccgagtagctgggactacaggcgcctgccaccatgcccggctaatttttttatattttttagtagagacagggtttcgtcgtgttagccaggatggtcttgatctcctgaccttgtgatccacccgcctcagcctcccaaagtgctgggattacaggtgtgagccaccgtgcctgaccaactgtataatggttttagtaatggcttctatttcacaaggttgtgaggatgcaattagttaaggtatgtaaagtaagtaaaatgttgcttcacacatagtgctattatatatttgatactatttaatttaaaataatataaaattgaaccaattatataaagcagaaatcacacatctcactacatttgacctctagcaatcttgtatctattactatgcatgacaatgggttcctattggaaaatccctatgagcagctactttataaacaaattttatgcccatttcgggaggaatgttattaactaaacattctattgcaacaaaaccaaaaattgacaagtggtacctaattaaactaaagagcttctgtacagcaaaagaaactatcaacagaataaacagacaacctacaaaatgagacaaaatatttgcaaactctggatccatctaaggtctaatatctgcaattaaacaaccccattaaaaaatgagcaaaggacatgaacagacacttctcaaaagaagacatacacatggccaacaagcagaggaaaaaaatgctcaacatcaacatcactaatcattagagaaatgcaaatcaaaaccacaatgagattccatctcacactagtcagaatggctattaataaacagtcaaaaaaaagtcaaaaaataacagatgctagtgaggttgcagagcaaagggaaagtttatacactgctggtgggaatgtacattagttcagccactgtggaaagtagtttggagatttctcaaacagcttaaaacagaaatgccatttgacctagcagtcccattattgggtatataatgggaaggaatataaatcattctcccataaagacacatgcatatgcatgttcattgtagcactattcacaatagcaaagatatggactcaacctagatgcccaacaatggtggactgaataaagaaaatgtggcatatatacaccacggaatactatgcagctatgaaaaagaagaaaatcatgtcctttgcagcaaagtggatggagttggaggccattctccaaagcaaattaatgcaggaacagaaaattaaataccacatgttctcactcataagtgggagctaaacattgaatacacatggacacaaagaagggaacagacaccagggcctacttcaggatagagtgggaggagggtgaggatctaaaaactacctatcaagggctgagtgcagcggctcacacctgtaatcccagcactttgggaggccaaggcaggtggatcacctgaggtcgggagttcgagatcagcctgtctaacatggtgaaaccctgtctctactaaaaatacaaaattagctgggcgtggtggtgcatgcctataatcccagctacttgggaggctgaggcaggagaattgcttgaacccaggaggcagaggtcgcagtgagccggaatcgtgccactgcactccagcctgggtgacagagtaagactctgtctccaaaaacaatgacgacaacaaaaaactacctatcaggtactatgctcattacctggatgacaaaataatctgtacaccaaacctctgcaacatggcaatttacacatgtaacaaacctgcacatgtacccctaaacctaaaataaaagttggaaaataaaataagtaaataagaagacattctagaaacctagagtgaaggctccgtcccttgcttatcttacaaagcagatcttatgtactctaaaaaattttgtcttacctgttccaggaggtccttgaataatagccagttcccttgtgagagcaaactgcaaggcttccatctgggagtcatccagcttcagggcttcttttgagggccactggccaggatctaagacattaattctgggatgtctcaaaccctcgacatttcttagaaattccccagtggctgaaggattctctattaagggggtaaagtcgtatctgccccccattagcaagtaccttggctccttcacatgagagttacactccacgatattcctctggaagggaacatcttcctcctggacctcctggagtccttccaggacgtgcctgtaggcctcaaagtatgcagttgtctctaccatgaggaaagagtcagagggctggacctctgctagcagctgttggctttgctcattgaagcagagctggacaattcctcggcagagatcttcctgctccctgttagatacggtggcaaaaagaaatgtctcgaagttgtccttggacatgcataccaaagacccatagagcaatcgtttggaattctgccagcgaacaaacttcagtggttttgtgtcaaactgcaccttgtagactatgcctgatgatgaacacatgggggtgataatcctggtgtcaaagtagattcggatgtcatcaaactttctcttcctcaggccctggtcttcaaagctttggagaagttccaaaataccttcccgtaaaggtctgacgaaatcttctcgcaggagccggaagtgggtatccagatagatagcagtgctgtcgtattttccagaaatgatattggggcgaaggaagggcctctcatccaagtgcacttcattgtaggtagggtaaatgggcatggttcggtagctctcaacatggtcttctgcctcaggctgcactagagtgtaggtatccactctcaaagtgccctctcgcctcttttcctgcagatgttcaatgatagtctgtaccttttccaggttcttctccgtttcctcttctatgtcaacaccagaggctctcagagcattaagagaggttggcaggagggaaaccagcatggaagtttcctgcacagagctggcagggaagacacttacaaggtcctggaggagggagatgatgttgcttatgtgctctggatactggtttcggatgtcagggatgggttcagtgatcatccctaccacataagcaggcaggcagactttgagaaatttggagtttttcaatatgcccagtacatggagaacactctggcgatccattttggagctacaagccttccgaagaacctgacagatgagctcaaggaagttagatttcatggaagaatgagaaaggagctctttcagccctaaacttgtggcaagtgtgatgaccacctcagaagggtctttctgcagaagactttctaagaacttgtagcccagtttcttcgcctgctgtggctgttctgtaggcttctggtggggagtccgccactgctggaagttgtcattggaccatggtggtctgcggttcctacagtcctggttgccatttctccacctggtgtcattctcctggtcatgtctttggtctctagcttcgtcgctggcatgcccctcctggttcctccttccttgatgtgggttcctgcccatggccctaaatctctcttccctctgccagtaagcagcaggatggttgttggccctaggatgccttccagggtggctggctcctcctcggagagcattggctggtgggttattggcctgatttctagctcttggtggtaactctccatccacagggcctaaacacaatgaaatattgagtaaccacaagaaccaagttctgttggaaacccaacagaacgacaatgaacgtgctttcattttccaaaataactaaagagctcaggttttatacggtaagaaaaacggtttctaccaagtcatatgataaatgaaagataattactgttgctgtagaggttaggaaaatattatttttacaaaggacgcaaaagggaaaaggaataaacagttattgagtacctgatgtgtgttagagaataaatacatacagtatgtctcattgcttctaatctcatgccagtaccaaataacagtcagaacatgagtttaaaggccaaactgacttggttcaaacattggcctggccactgccttactatataaccttggccaagttgtataatttctctaagtctcagtttctgctttttttttttttttgagatggaatcttgctctgtctcccaggctggagtgcagtggtgcgatctcagctcactgcaacctctgcctcctaggttcaagtgattctcctgcctcggctcccgagcagctgggattacacacacctgccaccgcgcctggctaatttttatatttttagtagagatggggtttcaccatcttggccaggctggtcttgaactcctgacattgtgatccacccgcctcagcctcccaaagtgctggaagtgctgggattacaggcgtaagccaccgtgcctggtggggattttataaagattaaatgtttataaagtgcttagtatagtactggacacattaaaaactctcaataaatgttagttattactagtagcaataattgggaatatcctattgattctaagggggccactggttctaccactaaacaattatcacagccaacagagacatcaagtgaaataatattacaaagggaagtactacctgaatgctgtccagcatcagcaaatgcagtttgaatgggaaagagaaaggtggggtttccttaccaagatgtttttgagctaacagactatgaaagaaactgaaaaatgaaactcaagttttcctcctttctgtagcatgaacttcaccctcatagtacttaccaattaccaacccttatacaggaagcctaacatacccaaagtccagtttttttcactttcctttttgctaaaactgattctggggctgacctaacttagcagaatgacatgaagattttaaaaacaaataaaatacgactgtatacaatgatttgataaaaaagttgtaaaagcttcaaatgcatgttatatttgagatgattataccatttcctgacatcagatactaaattgatttatgcacactcttccttgttttgcattttgtagagaattttattttttattttttattttttgagagggagtctggctctgtcgcccaggctggagtccagtggcatgatcttggctcactgcaacctccgcctcccgggttcaagcaattctcctgactcagcctcctgagtagctgggactacaggtacctgctgacacacctggctacttttttgtgtttttagtagagatggggtttcaccatgttagcctcgatggtctcaatctcctgacctcgtgatccgcctgcctcggcctcccaaagtgctgggattacaggtgtcagccaccgtgcccagccgagactttaatgtgacaacataaaggaatatttggtaaaatataaatgatctacaactgaactctaaatttttataattgttacttacatatttacttttcaaactacctccaaaatcagaagaaagtactacttttaatatttttatctgattagaagactctatgtcttggaagaatggaaaatcgtatcatttcttattctttcaacattcatggccaggtgtggtggctcatgcctgtaatcccagcactttgggaggctaaggcaggcagatcgcttgagctcaggagtttcagaccagcctgggcaacatggagaaaccctgtctctactaaaaatacaaaaatgagccacacgtgatggtgcacgcttgtggtcccagctacttgggaggctgaggtgggatgattgcttgagcccgggaggtcggggctgcagtaagccaagatcatgccatggcactccagcctgggcaacagagcaagaccctgtctcaaaacaaaaaacaaaccattcacatagctcacaagagcccatagttcttcctcatttgttccacagctaaaactctttggaagacacatttcaaacttatggaaaagcaggaatccatttggttgtttagttttagaaagtgctgagcaagcagaataattcctttagtagagtgatggtcttggaactaatttagctttggtgactaggattcacgatctgcactatccaatacaaagccattagccacatgtggctgctatgtttgtgaaatgtaactactttgaattaagacgtgtaaaacacacgagattttgaaagctagtaccaaagactgttaagcattacattaaaaatttttatgttgataatatcttaaaatgagtatttgagggaaataaatatatgtgaattattaaagtatgataataaactatagtcaattattataatcaaataacattttggttatactgggttaaataagacattattaaattcctaaattttattaaattgtcatcaaattgaaaaaataaatttcaaggccaggcacagtggctcacgcctgtaatgctagcactttgggaggccaaggtgggtggatcacctgaggttaggagtttgagaccattctggtccaacatagtgaaaccctgtctctactaaaaacacgaaaattagctgggcatggtggcaggcacctgtaatcccagctacttgggaggctgaggcaggagaatcgcttgaacctgggaggtggaggttgcagtgaaccgagatcgcaccactgcactccagcctgggcaacagagcgagactccgtctcaaaataaataaataaatacataaataaatttcatctgtttcttcttacgttttaaaatgatgtttctagaaaataaaaactaggccgggcgtggtggctcacgcctgtaatcccagcactttgggaggccgaggcaggcggatcacgaggtcaggagatcaagaccatcctggctaacacggtgaaaccccgtctctactgaaaatacaaaaaaattagccgggcgtggtggtgggcacctgtaatcccagctacttgggaggctgaggcaggagaatggcgtgaacccgggaggcggagcttgcagtgagcagagatcgcgccactgcactccagcctgggcgaaagagcgagactctgtctcaaaaaaaaaaaataaaataaaaaataaaaacttatgctcttggcttacattgtttctattggatgctgctctacaccaaacgtcatttccctttctgaaactctatcactgtttttgttaaagtgaactgcacccattcatcagctctcttaggaaaagtggagggttggctgtttttcagagtaattcatgaagtaattaagaaataactcattctttttttttttgagacaaggtctttctgtcacccaggctggagtgcagaggccagatcacagtccagagcaacctctgccttctacacccaccccttcctgaggttcaagggatcctcccacttcagcctcccaagtagcctaagtagctgggactacaggcacgcagcaccaagcccggctaatttatatatttttttgtagagaaagcctattgccatgttgcccaggctggtctcaatcccctgggcgtaaacaatcctcccgcctcaggctcccaaaatgctaggattataggcttgagccactgcatccagccatagtcattctttacttgagagatgcagacaatcttaggtaggcctgctcatttatagagagccctatttccttcttttattactagaatttccttctcattaggtaggaaaccttgcttacctctgtggttggtatgggaattcctgggcctggcatccagatgaggtcttctctcctccatgtctgagtcacctgaattccttcacgttactttctgttatctggaaaactgcacatgttgagttatcagtgtcctcgaaacatagcatctagcagcaaaaacccaaacaccatcaagccagtccttctgcctttgttaacattttaatgatttgttaactaagggttaaatacagattttaatctagagcacaagtgctcgactctgcaaatgcccaattatgatataaaatattaaattcacaatttagctgatttcaagagatagaattcccctttcttttaccctggcactttcttggggtagagggaatgtcatcaattcccattcaaaactgctgtttggtttatgcctttagccaagttacttaatcagttgctaggtttcattttcctttcctaagaagcagacaatattgttgccaggacaaaaaggagtacatttttgttaatccaaaaccatgtgctcaccaccttatctggcatttacatatctgccacttatatagtacccaatagcttgcagtaccctacagtttataaataattagtgagcagttatccccttagcctactctttggaatggagccaaatgattaagctctctgctctactgaatcaagagaaagaaattacatgtttcaataaccaggaggtttggcaactacgaggtgctgtttcctcaggaccagctagaaatctgatattctttcttcctcctcattcttctaccttggtgatttttgacactggtcctgtaagaggaagaggaagcccctttaagggagcttctcaacccaactcatacacatggtgtgggctggggctaaggaaagagtgggtgactcagagtcctcagcaaagggatttttgagactgtcttcactgagttctaaaatattcataattggaaactgtgactacatttggcattatatgaggggcagcttttttcctcatctgaaaaaggagtctcttttcttccccctgggaatatctctggtgagtcccctccctcatcttatcaaacccagccctcctggcgcaggctcagtatttagagtttgtttgtttattttcaattctccgaggggaaaattccttcttccccttgttgaaaaatgctaaaatagaaactccagaaaatttaaaagaaacggaagaaaagaaaaaaagatgttaaaaaaaaggcaagggaaggaagggaggagtagacatgaacaggaaatgctgggatcgaaaacagactgaagtgtttttttttggtggggggaatcaaggcctaaagggcacgaagaagaaaatcagtgatgatcaagctggcctggagtcagaatgagaggggctagtcatcaccagagtgggacgcaggaggctgaggtcggaggcagagctgggtttgggggaagtctccagggtcctggggaatccctgacccagggagcccacggtccctaatggaaatgttatggggtcagggagcgccaaggctgtgaggtggcggggttatgggggccttggggagagggtggtagcgagcaccagggggtgcttgctgaggacggaggcggcggggtgggggcagggagcaggctgaagggggtgccgaggtgctctgtagaagagggggattgataaggtgacaggaggtgaggccggaggaatgaggggggtgcgagtggcagaagggagggcacagacaggggtaggggcagaggagatcgaagtgctgagggcagaagcggtgacggtgtcgggggtgctggggagagcgacgggccagctgaggggatggggacactaaagagagtacaggggagccgaaggggcgacggggcgctgagatgggccaggggctgagtgggtgacggggcgctgagtaggcgatggaggtctggggtctgagggggagacggggcgctgagaggcgctctgagtgggtgctgatgccgctgggggccaaagaggtgacaaggctctgagtgggtgatgggggtctggggattgagggggcgacggggcgctgaggggccaggggctctgagcgggtgacgggtgcgttgggggcttgagagggtgacaggtcttacgggcagaggcagtggcgggtcggcgcgggcgccggggttcgcggcgaggcaaggaagaatcaggggcaggggcagttgcggggccactcacccggctccggcgcgtcctttcactgccgccggcgagtgctggggcttcggcccaggcaggtcggtggccccgcccggcgccgcgcactttcggtttccgttccccgcagaccctgggcggagccgggcgggcggcccagaggaggagaaggaggaggcgggggcccagggtggagagcacgagggcctggcccaggcacggccggcgcctccgccctcgaggagggcgtcacctcagctccccccggcggcggagccggcgggctcaggcgggcgcggctgaggggagcggaccgcggggggcgggagatgactgcgcccaaggcctttgcgggcctcagccggccccagaggaaggggaacccgtcgagcggtttggtgcgtgtgaagcgcgacatggcgaggaagcggacaagcccgggtggcccggcgtgtagagggaagggggcggggctagacgcggcctggacaactactagagcgcctcgggctgtgctgctcgagactacatttcccagagcgacgcgcgcggagcgggcgggaaagagagcgtttcgggtccagtgcgcaggtgcgaaagccatctttggttatataagggaggttcaggaagccattcgttctttcgcgtctgcggtgcccggagtgtggtacttctcctagttgcagtcaggcttcatacgctattgtcctgcccgtaagttcccgttttgtgtgtggtgagtggaaactccatgttcttcgttggagacctctggtcctcccttcccttctttgtgccgtcgtctctgcggccagccctaatctccttctcgtggcttctccgtctctgaccccaaataggccttaagggcgtgggagaaatgagtttctggagctggaaaagccactgccttctgcacgggcctgagaagcccttggctggtgtaaatgatgacttcacttttttccccatcagatcgacaatgctgacgtcttatattttgccagttagttctgatacatcggcctcaaaaggcccggccttgttcgtttctgaccgtgggaagatggcggttaacgccctttatttgttggttcacaggttagagcagccagcgggtacagaatggattttggaagagggagtcaccactggacctccaaggaagccacgtgcagacatctacaaccttcgatctcctgacgagtaagtctttgtctcctatgggtctactgtagaaaacacgtgctttgagaagctttagttttctaggaaaacgtgggatttaacaaagcactttctatcgagcatttattaggtatttaaaaaagtgttctgacggccgggcgctgtggctgacgcctgtaaccccagcacttggggaggccaaggcagatgggtcacctgaggtcaagatttggagaccagcctggccaacatggtgaaaccctgactctattaaaaatacagaaattagctgggcgtggtggtacgcgcctgtaatcccagcaactcacaaggctgaggcaggagaattgcccgaacccgggcggcggaggttgtagtgagttgagattgcgccactgccctacagtcggggcaacagagccagactccgtctcaaaaaaaaaaaaaaaagaaaaacatgttctgaatgttttattctcacagttcaaatattggaactaggtttctggtgaagaaacaggtttaagagaaatgcctgaagtgaaagaaccttgttagtgaagaggcgtttaacattttaatgccacttaaacatatttttggattccattcttcctgtgtgttggggcgcttaaatttccaagtggagggatgatttattgacatattttggaaagccaaatgtgtttttctgttgaactagccactcaaaccagtgcccgactacataactaatatttttgctagagtccaggagtgaggcgtttacaaagtctgggcttcatgggaacacatgtgaagcttattgttccagattgttcttttgtcaggtaacttgtggtaacttgtgttaaaatgcaatctcttggtacttgttcacttcccaactcagtaaatgccaactacttcctcaactcttccagccacactggcttctatcatgggcctgtactcagagtgtaagcactgaagacaggggtgtttggtttggctaccaagttattgccagctacaggatacaacacagaagtgctcaaacaccgaatgcaaatttgcaaatatgaagcataccaaccaaatcttactcctcatggctttcaaatcttactcctcactcaagaacttcctgctggcatatatgatgacttagcttttttccccgacagatcgactatgttgatctaacttttctaagccagtttctgtctgatatgccagcttgagcagctcctttgtcccagctcccctgggcatctagctgatgggagctcatttttctgttttttcatttcaggtttattgttggccaaaaccaggctttgattgaaccaggatgaatgcgggtgttggaagtagaatatatatatacatataaaattggtaagtggtgccaacacgtcttccctggctgagtagacacaggctctggagggggtagtagctgcttttcagtgtgggtttgtcaccctacttcttgtacgactcaaatgtggcctttgcagctgatgatacagcttctttccccatcagatcgaccctgttgatctctacactattggccagttttgtctgatgcattggccccagtaataactcctatctttgttttctgcttatctttatcagagactattgcttgttcatgggaactgggctttctctattttttccagcattcagatggcttcttttgacctgttaactttctataggttgggagccacgtgtaccagtgtgtgttgatcttggcttgattcagtctgccttgtaacaggtgaggtttctgctttctatctgccaaaccccaccgcaaaatttgtccaactgggcctaacctcaggacccatttccaagttgggtataaaactgggagaataagtcattaggactgacattggcctgttggtattactaggtctttgttggaaataagagcttggagttccaaagaaaacgagcacttgaacaaaagatttctcagcaaggcaaatttacttctgccgtagggtgctgctgctggcattcctggcaagagcacacctaacaaaagagagaaagggtttttattcctaacaagtagtccctgcttctgtgtcctatccccattggctggagtcgacagcgcaatctaaactagtcctgattggctattttaaacaggaggcatgtgggttacagctgtgggaagggcaggaaacttgtttacagagctggttgctaggagtgagggggacttttccaaatagggaacaggttacaggttgagattggccggagaagttgtttatagaacgggtaactcggagcaggaaggtatgaggaagttgaccttaagaacaaagaacaaggaagttaaaactttgaagagaaatccattgtatctaacgatttcccccttttgatttttataattatttctcttcagacttgttttagcgtgtcttgattttgttcctcttggtcctctgaaattagaagcttaactgaatgatgcgagggaggattgaggaagattttggtgggtgagagctgttaaaataagcttttgtattaatcctcagatacagggtatgatacagcatcctacaagaatgagcaaacctattctgatggcaggagattgaggacgtaagtcctttccatttgcggaactatttttccattaaaatcgtgaaggggtcatttattccagaatttctagctagctcattggataaagcagtaagtccttgggcctttgttatggttccatcgggagcagtattattagggatgaaagtacaacactgggttccaatcatgacacaaactacacctttctccgctagtatcatgtctaatgctattgtattttctcaggccgtttgactggtgggccctaattgttaaactgttcccttaatagcatccctagtataattaatgaatcgttgctgggttacattttttgtgttttttttgagatggagtctcactctgtcgcccaggctggagtgcaatggtgcaatggttcactgcaacttccacctcctgggttcaacctactctccttcagcctcctgagtagctgggggctgtcaccatgttggtcaggctggtctcaaactcctgatcttgtgatccacccgcctcagcctcctaacatgctgggattacaggcgtgtgccaccactcccggcccaatctacatttttatttagagttgaccaccagaacaacatggattcaaacttgcagctatttgattttgggccttaaatctatctggcactcctcgtgggattccaatggcatctatataaacatgagagtcacgagggacatccattgttttatgatgttctgtttttatgtatgttttctggatgaaataccagggtgaaagggagatagccaattggattagagctcaagtgccacgccaagtaacttggcagagtattcagtaatggtccaccacaacaccaccatacgtttgcttggggatgaataagggacgactgattggtaagctcctggaagggcttaagctcactgcatctcgttaggtctccaagcaaattcaagttctccccctgtgagagacacgaggtaaaattggcattggaagacggatgcttgatggccctcgggggctgacccgcagggtgtcggacttcaggggacttcaggaaacagcagcgagagagtttggcatagcttattgccccaggttgtggggtcttggaagagagctgccatacaacttaatgcctgatcggctggaggacgatccgagtggaaagggaacaatctggggctctggcttaccacgtgcgtaagcataacaatcgctttgtttagcgagcggacagaatgtttaatccattccagccatgcatttgcatctcggtaccgtttcaattggtagagtttgctttagatctttaacctctacaatggtcactttggttttgtcattgggtgtttgtttagaaggggatgaagggggtgggggaacaatgaagcgcatttcgaaagatcctgtagggtctatccctaatgttgcggctcccatgctgtagaagctacttaaagtgggattaggattggtggaggtagaggtaagaatagaaatttgcactgggttacattggtgatattggcaattagagggggccttccctttgaaacgaaggtagggttgtagagagatgcagctttttggggaagtctacccttgaggatcggtattccataggacgtcattccgggatgggcagaacctctcctcaaacccttcccattcccaaactgcaaagaatgtaatggatttagtttcgattaggcaagcattgtgtgaggatttagaatttatcttggaagggcagagatatttttctgagaaggccagttgcctctggttttggagatccccacaggatatgacaagacaggcatcaaatgtgattgaggtgagcttgatctagttacattaatgataaaatagctgacggtagagagaggaaagaagacaaggcagtataagagggttaaagttttcgtagctttaggttggtagaaattggccctggaacaatagcccatgactctgaagatggtgatgctgttttgactggggtatgatgggtccaccccttttcggctgttcgggctgctgtttcagttaggagtgctaggtatggtccttcccaagctggctccttccagcttttgataaggatgtgatctccaggctggtattgatgtaccaggaactgtaagggtggcatctgtgctaaaatacctttagttctgaggtaagagaaagtggaaagccaagtatataatttgatcctttgtttcaaaggtaggaatgtcagtagtaagagtgtaaataaggcagtccacataacagagagataggccagtatctttctgagaggcagtcctgactgaattaggtgaatctgtaaacccttggggtaggactctccattggtactgctgcttccatccagaatgagggttttcccactcaaaagcaaatacttctcttgtcttcagccaagggacatgcccagaaggcatcttttaaatctgttactctgaaccattgattgtcatggaattctgctgaggatggtaaaaggattggggacaacagggtgggtagtctggactatttggttgatagcctggagatcttgtactagttgatgagacctgtctgatttctttacaggtaatactggggtgttaatagggggacatacagggttcagggaatcagtcctgaatgagaacttcaactacaggctttaattctattctgccctctaggggaatgggatattacctttttcttactatttcccctggggtctttaactttgtatggattggagtgacttgaagtttctttttttctttcttttttttttttgagttggagtctctgtcacccaagctggagtgcaatggtgtgatcttaagccactgcaacctttgcctcctgggttcaaacaattctcctgcctcggcctcctgagtagctgggattacaggcgcctgccactgcacccagctaatttttgtatttttagtagagatggggtttcaccatgttggccaggctggtctcaaactcctgacctcgtgatccacccaccttggcctcccaaagtgctggtatttcaagtgtgagccagcaagcccagcctccctgatttctttttcctgcccatacatgaggatgaatgtatttttcttctgcggtggtaagtctcttcctaataagttcgttcctgcctcagggattaacaggaatttaacatgggctgatcaatttttgtatagacctctgtcttttaagatttttgctttaaatcttttatccctgagatagaaagttcttctgaagaacaggtgatagataccagatgggagggaacgggagcgagctgctgctgaatctgtaagaaggttttaagttcacatttgggtcccacctctaaatttatcaggggctcttggtgggactcaaggtaaaagagacagcccctgacctccctattttcctggaaggccataagtggaatattttttctttttcccatttggggcattctcttttgaagtgacctactcttccacatttgaaacatttgttttcccctcttccctgtcctgcactgtgacttccaggttttattcccttactccttgtatacagtttggtcgctggtggcctagagggtttgtaagttttacttccttgtgtctcctactgcagagttctctgttgtaaggtagacagcatgatttttgccttttgtttctgctgctctttgtccctacttatatgcttctctaagaagttagtctctgggacaatctttccaattctctatcttttgtagttgtttttagaggtgtttggccaagtcttagtaacaaaatgaagctttagcatcccttgccccagtgggtcttccatttctaaacctgcatattttctcatctgttctttaagcctatttaggaattcatgggtccttcatccatcccttgtatgttgaatgcttgggaaatactctcagttcgggatactgatggaacattttgaccggtagggtgttaatgttcccagactaccaaagcagccctatggatcatggttcttctcccaagaagggaatgcctaaaatggacataagctcggcccatacaactggggtcctaaaaaatgatttgatctgctaccccataagggtcatctaacaagggcttgagtttttctttttttttagattttgtacttctgagctggttaagggggcatttacgaagctgatgcctcctctcccaaggggcacttcttcaaggggaagagagttgggggcaattctttggaggtggaaaggggaaagggaagttctgagtatcctttttacattgttctatttcatgctgtagggcttaagtgtgtggctagggggaacatggggtattgattcaggattatatgggggagggactgatgagtggggggatcctgtgtaccggcttgatgcatggggtttggcagaggcaagtggtctggtgggtcccatatgttagcaggctgttcgggggtagagaccttactcctttcagaggagttggcttctggcttgcttcctgtagttatgtttagtcctttcactatccttttagcatgagaacctaggggactgtcagaggggatgttactgtcattaatttgatcctttctatttactgtctttcttgaggtattttgcataatgaaggtttggtgtgaggcccaaaattagatttattgcctttcctcataggctcaacctcccttactggagatttcttgccattcctttctctagagggtcagcccctggctactggagatttcttgcactcttctccttttgcttcatccttctctggctgcttcccaggagggaatatttcaggtcctccttagcattggtgtgtcagtataagccccatgacaggaatccaccataagctatacgaggtgaccatggaatcacagatccggaatcatcgctcgcttcgcactcagttgtgcgtctcattgacacactttcaacctctaaaatgccctgaccaccaaggaaatactttgtcgcccctgtgacttttcttaacttggtctgtgcagttacctggtcaccgcagtatgtgaggatcctttccgcctgtgttgctgagagtctgggtttatgtgtcaccttgggtgggacccaatctcctgtttgtgaggccaccgcaaagaggtggtgggatgcctctcctcaagagaggtgatcgtgggcttctcctgaaggagaacggtaatcccagatgagctcccaaattgttggcaataagagctcagagttgcaaagaaaatgatctccaaaagatttctcagcaaggcagatttacttctgcagaatggtgctgcttgcactcctggtcacagtgagagcaccccgaacaaaggaggtgaagtggtttttatccctaacacagctagttcctgcttctgtgttctatccccattggctagagtccaatctaaactagtcctgattggctattttaaacaggaggggtgtgggttacagcagtgggaagagcagttgccacgagcgagggagacttttccagataaggaacaaatgcgggttacaggttgggattggtgggagaaatgtttacagaatgggtaattaggagtgggaaggtatgaggaagttgaccttaagaacaaagaacaaggaagttaaactttgaagagaaacccatcatacctaacagtcttgtaagaaaggatgacaaagtgattgaacattgggtggagctaattttccttggccaattcacttagtaagataaggagctccaaatcatatttaagttgggagtcaattgattttacttaattcttgtgaggttcagttataagattcatcatactactaccatgagccatcctcagctccttgttacatgggcctgttaacatggcagctttgtctataagcaaacccaggagagaaagacatagcagagatggatgtttgaagtctataccttccaccccctttaaagagaaagtaacaccactccttttctgtgtcccttggggacactacctccatgtctggtcacatggctggactttacagcagataagcatactgtggcctgagaccatgattgtatgctttccttctgctgacctttacaatccctcaataaattgagctaacacagggaagcttttttaccaaataactgtgttgcatcatcctccagtttgcctggtgtccttaatcaatggaaggggaataagcaaactgagttttcttacaccttttgagtatagtgtttttgccatcatagatgtggctcctcataattctccaacttttatattaaaaaaccaaaacctcaaaaattgtagttcatgtcagtcagtgatgactcatcttagaagtattttgtttttggatgtgtgaatgtgcatagttcttaaagtccaacattcatgtaataagacatcttgcatataacaatgacccttacgtctaagatgttaaatagatcctaagcctggtataactttattcaagtatccttatttgcccctaaaatgtctttaatacacattacttgggttatttcttgaatgaacatacaggtatcccaatttctgtttttaagagaatggggtcttgctctgtcacccaggctggagtgcagtggtgcagtcatggcttactgcatccatgatcctcctgcctcagcctcccaagtagatgggactgaaagcacacactgccatccctggctaatgttttcatattttgtagagttgcagccttgctacgtgacccaggctggagtgtagtagctattcacaggcatgattgcttgaaactcatggcttcaagggaaactcccaccctcaatatcctcagtagctgcaactacagccataccccccactgctcagcttctcatcctttaaaagatttttactggtagtgtcctcattctgggtttttgtcttctgtgtttactgtgacatgaagtcatttttagatgaaggttaaacattttgccaacgcaggtacaatatgggattcaataaaagtacagaattaaagttgtcttattagagattgggaagtttcccagctccgtttatcggtacttggccgtaccgataaaggggatggacttggagtgaccaggtcttagtcacatgtattttcataccctaaacaagaagcggtatagaccagaatggagcactgattgtaatccaccttctttcttagaaactggcgatggaatatgagaggagccctctggaaagaaaaggacagaccctgtgctttcatgaaagtgaagatctggctgaaccagttccacaaggttactgtatacatagcctgagtttaaaaggctgtgcccacttcaagaatgtcattgttagactttgaaatttctaactgcctacctgcataaagaaaataaaatcttttaaatcaaaatgctgttttgtttggccattggagataaccattgaacagggataacaagtagtagttaggtatttgcagtttcatttggttttagttttttgaggggagaatcaccctagtgggcagttggtttctgtgggcaaagcctgctttccacaggtattgtgcctcgtgattggcttctgcattggaaacctaagaataagcaagcacacttgggccagaattcaaagcagagggtcaatacagaggtatctcacttgtatgcttacacctgcacaagatcgtgtatgttaaatcgtgggtattaggccttaatggttgcatgagatgagtaaggatgatgtgggctatggtatttgtttataaacttcataggaaattgcaaaaataggctgcatcatttatcaatatgtgatgattttttatttaaaatacacagtgaataattttttaagtatcttaaaatctcacctcaaagatgggacctctagatttcttttttttttctgaggcagagtctcgctgtgtcacccaggctggagtgcagtggcatgatctcagctcactgcgagctctgcttcctgggttcacattctcctgcctcagcctcccaagtagctgggactacaggtgcccgtcaccacgcccggctaattttttgtatttttagtagagacgggttttcgctgttttagccaggatggtcttgatctcctgaccttgtgatctgcccacttcggcctcccaaagtgctgggataacaggcatgagccactgcgcccagcctgggacctctagatttctaaaatgactcctggtattgactcagaatcccctccccttgactaggctggacctagtgtaacttctgagacttgctagctctttttctcattctccttggcttgctcactttttttttttttttttgagatctcagctcactgcaacctccgtcccctgggtttaagcaaattctcctgcctcaccctcccgagtagcttggattaccacgcctggctaatttttgtatatttagtagagggggttcaccatgttggccaggctggtcttgaactcctgacctcaagtgatctgcctgcgtcaagcctcccaaagtgttggaattacaggcgtgagccaccacgcctggcctagcttgctcacttttaattaagctgccatgttgggagaggccagcgtagcaatcaactgaggttgaaccattagtgtgggaggagttacccaacaaccatgtgagtttgtaagcacgtctttctgtagcggaggcttgtgagaaaccctgagagcggacccacccagattgtgcttggatttctgacctatgggaaatgtatttcaagccactaggttttgagataacttgctacaaagcagtaaattcacaactctataatgcccactctaaaggtcctgacatgggcatctccattacctaagtcaactgatgctacttcaatttctccacgtagcatttgaagcgtttatgtctggccccagcctacattttcagacttatttgtgcatttgacttaacatgtccaaaactaaatgcctgatgcttcactcacctaaccccattccctgcaagtctgtgcttcctgcgatcttcccttcccaggtattggcaacaccagaagtccagttggtcaggagctgtggaatcaacctcatgtaccatgtgaatcccttggcaaatgctattggttctaccttcaaaatacatctgaaacccaccccctcttagcgtcttcattgctaccaccttggtacaaaccatcaaacaagcttggaatactggtctctacttcagcctttgctccctacgatcaattgagatgcaaccagagcgatctgtgaaaacctgaattaggtatggagctctctgctcagaagcctccagtgtcttccccacctcacacagtaaaagccaaagtccatcagggcctacatgatcttccccttcccttaacctctaacttcatctcttccctttcaatcttagccacatgggccccctgacttctccattcctttaggattactccaacctcagtatcttagcacttgattttcccactgcctggaatgatcagccctagacccccagagctttgcacagccctctgccttgtgtcattcaggtatttgctctcactccctctggggaactgtctaatcatctctatcactttctattcccttatcttgttttttatttttttaaatagaaactgttgctcaggcgggtctcaaactcctgggcttaagggatcctccctatttggcctcccaaagtgctagaattacaggcatgagccaccatgcctggccatgtttttacttagtgcctaacaggtactgcctatgtgtatagtatatacatgcatgtacatatacatctatgtatatgtgtatatatagtttgtcatacagctgttaagtggcagagcatgcatttgattctgtcagtctgctcttgtatttgtggggtgtttgttttgttttttgagacggagtcttgctgtgtcccccaggctggagtgcaatctcagctccctataaccttcgcctcttgggttcaagggattctcctgtttcagcctcctgagtagctgggattacagaagcctgcacggtgccccttaatttttgtatttttagtagaggtggggtttcaccatgttggccagactggtctcgaactcctgacctcaagtgatccacctgcctaggcctcccaaagtgctgggattacaggcatgacccacgtgcctggcctggcacttgtatttgtaacccttggcttaattgcaacatgttacttcaatgcagtctaatggatacaggaaggagataatttctggctcttaaaagctcaaatgcttttgctggacttctgtgttgatgagataccactgaggtcagaaatggccccaaatacctgccagccaggggccagagaagcttcctggagaactcccagccacacccatagtctcagctttgctgttgcttctctgagctccaaggcagttgtaggcctctaatgatcaaactattggcaacccgtctctagctttagctcctaccagtcccaccaaacatttgatgcttcagtctcgttttacctctttgtcttattgactgaggagtcctttccttctataagcttcagtttcctcatctgtgaaatgaggtttattgggtgcttgccacgtgccaatattgtgctattatctcatttaatctataccccaactctgttattaccctattttatagatagcaaaacaggctcagggaggtttggtgagttcatgtaccttgaaggtggttcttgaaagctgggatgtgaaccagtactatcctaggcccctaatttccaagggcctttgcttaagaccctcaccaactgcatgggtaaaagcacaagcatggccaggcgcggtggctcacgcctgtaatcccagcactttgggaggccgagccgggcagatcacaaggtcaagagattgagaccatcctggccaacatggtgaaaacccgtctctactaaaaatacaaaaattggctgggcgtggtggcccgtgcctgtagtcccagctacttggcaggctgaggcaggagaatcacttgaaccctggaggtggaggttacagtgagccgagattgcaccactgcactacaccttgacaatggagtgagactccatctcaaaataaaaacaaaacaaaaacaaagaaaaacccacacaagcatttctggaaagctgtgggaaaaaataagagattcacaatgtcttccagaattttagctgagaggtggtggtattatctcccccataccccactactcattttctgggaacagagcagttttacaaatggtttggagcttgggcttattcccagctcctggcagacagcagtaacttccccagatctcctatctgtaaagtgggcataacatgtctttcctcctggagttactgtgaggatcaagtgagacaatgtgtcctctaaatgcttgaccacagggttaggtcagtaattgttgcgggaagtcagggaccccaaacggagggaccgcctgaagccatgacagaagaacgtggattgtgaagattttatggacatttattagttctccaagttaatacttttgtaatttcttacgcctgtctttactgcaatctctaaacgtaaattgtaaagatttcatggacttccccaatcaatacccttgtgatttcctatgcctgtctttactttaatctcttaatcctgtcagttgaggaggatgtatatcgttccaggaccctgtaataattgcgttaactacaaaaattgtacagcatgtgtgtttgagcaatatgaaatgtgggcatcctgaaaaaagaacaggataacagcaattgttcagggaataagagagataaccttaaactctgactgctggtgagccgcgcagaacagtcatatttctcttctttcaaaagcaaatgggagaaatatcgctgaattctttttctcagcatggaacatccctgagaaagagaatgtgcacctagggataggtatctgaactggccccaccggggcgtacctgtctcttatggtcgagattgcagaggtgaaataaactccggtctcccatagcgctcccaggcttattaggaagaggaaattcctgcctaataaattttggttgatctcaaaaccctgtctcctgataagatgttatcaatgacaatggtgcccgaaacttcattagcaattttaatttcgcctcggtcctgtggtcctgtgatctcgccctgcctccacttgccttgtgatattctattaccctgttaagtacttgatgtctgtcacccacgcctattcacacactccctccccttttgaaaatccctaacaaaaacttggctggtttttgtggcttgtggggcatcacggatcctaccaacgtgtgatatcacccccggacgcccagctttaaaatttctctcttttgtactctgtccctttatttctcaagccagctgatgcttaggaaaatagaaaagaacctacgtgattatcagggcaggtcccccgataagtaatagtcatcttcatccgagtgaaaaggaataaactagtgattgtgcaacaacttggatgaaccccagagatgcgatgctgactgagggaagccagcctcaaatggttacatgctgtgtgattccatttatttgacattctggaaaagacaaaggtatgatgaagggaagagatgatggtgttgccagaagttaggatgggtggcggatgtggatgtaaagggatcgcacaaggaagtgtttggggtgtcatgattgccgtagtggttatatgaatgtactgggccaggcatggtggctcacgcctgtaatcccagcactttgggaggcccaggtgggtggatcacctgaggttaggaatttgagaccaccccggccaacatcgtgaaaccccatctctccatctctactaaaaatacaaaaattagctaggcgtggtggcgcgtgcctgtaatcccagctacttgggaggctgaggcaggagaatcacttgaacctggaaggtggaggctgcagtgagctgagatcgcaccattgcactccagcctgggcaatagagtgagactccgtctcgaaacaaaacaaaaacccagatttatagaactgtacagcaaaataaaaaaatagttttattgtatgacaatttttttattatttatttttgagacagggtcttgctctgtcacccaggctggagtgcaatggtgcgatcttagctcactgcagcctccaccttccgggttcaagcaatcctcccacctcagcctcctgagtagctgtgactacaggtgcgtgctaccacactcagctaatttttaaatttttttagagataggggtctcactatgttgctggagttgatctcaaactcctggtctcaagtgatcctcctgcctcaccctccgaaagtgctttttaaaaatgttaaaaacaaacataggctctggagctagacttgggtttaaatcccggctctgttatgtattagccattggctcaatcttctttttcttttcctagattttgcctgcctgagctcctctagtagtggccacaattgccagagaagatagagcaggtctctcccaggacttgcagctccagcctgtgtctgcaaggggtgttgtagcgactgatttctccagcccatggcaagaggccttcatcttgtgcctggaaagagggaagtacaagtccgtctggcagagatggtgcagatgggcaagtttttcagacactgcagccagcacttctgggaccgcagcagtggagcctgcagagggccggttctccaggcatgggctactgacattgtcacttccagactccttatgcaataaacaacccctaaacagatttattcacaatttctccatcctaacaagtcagtgatcagttttcacttttccacattcccttctgtccccattatgttcccatagtggggcagcttctacctgcatggttggagcttcccatttttaaagaggcaagaaatcctttaaagttctttgaaatgtttgtagcctgttccaattttataaactgtgaagactgagcaacacacaatgcatgggcctcatatggcctggaggccaccagttggagacctctgtagcttgagctgtgtccctttcagcactgttcttgtcattcctgagctgggatgccccctgaaacataggatgctcagttaaatttgaatttctttttttttttccttgaaatggagtgtcgctctgtcgccaggctggagtgctgtggcgtgatctcagctcactgcaacctccacctccctagttcaagtgattctcctgcctcagcctcccgagtagctgggattacaggcatgcaccaccacacccagctaatttttgtatttttagtagagacagagtttcaccatgttggccaggatggtcttgatctcctaacctcatgatctgcccgcctcggcctcccaaagtgctgtgattacaggtgtgaaccactgcgcccggccgatggcaatcattctttaagatgcagcctccgtggacctcgtaccttctcagtaatttccatattctttgctgacttgggtttttcctccaaaattgtctgggataaattgaggtttgtggagtttcctgatggctagtttccaaactggcttcaaagcctgggcttgtggaattggctgggtctgcggccagcctaacccatccttcggtcacagtctcccatggtcctgatattaattcatcacaggtctgtttagaaggtggcagaaacagacggtcttgggcttatttatatctgtggctttttttaaaagacagaaaaggagaaatctggatcctttccttgtcagcctcctttaactaaatggtcttttgctaaaatagactggccccactgtgtgggtaggaagggttgagatgggagtgggccaagtgagtgagaactttttttttttgccttgatgttaaaatggcagcatgtgcagtcttctgcctctgcccaggttgacctgatgtttttacagggagagaggctgcttgttgagtgtggtggtatttatcatagtgtatgttaggctgcctcaaacatccctcgctgtcgtacctttcagccaactctaatgtacctctctcagcctgatttctccccacttgagttataataacaacaactgccttttaaaaaatttcctactgggcttcatgctaggtactttccacgttttatttttatttatttattttttgagacagagtctcactctgtcacccacgctggagtgcagtggtgtgatcgcagctcactgcagcctcaaactcctgggctcaagcgagcctcctgcctcagcctcccgaatagctgggactacaggtttgtgctactgtgcccggctaatttttctatttttttgtagagacagtgtctccctttgtttcccaggctgatctctcctgggctcaagcgatcctcctgcctcaacctcccaaagtattgggattactggtgtgagccaccattatatgttttaaataatttattcctcacctcaagtgagtgaggtaacatcccagttttacagacaaggaaacagattgggcaggggaagtgacttgcctcagatgcacaataaatggctctgccagtgtcttccttagcgcctccgatccccttctcacccttgtcctctctgctcctctctgctcaatgctcctgggagcgtgaactgcattaatggctccttgtctggtggcctcaaggttccccaggaggcagggagggtgaggctgagatgtgtgctcccctaaggcacatgcctcagcctggctgcctctgtctaaggccacagcccctcaagtgcttccccacctgactttctgggctctggtaaccgcttcctgcctgccccatcaggtgtagggggtgcttcatgggtcaacattagcttatgtggtttccttatatcctgggcgcacctttgttagtctcaaattacattctgcttgaactattctctatccagtgggttgtgactatctagaggcagagttgggatttgaaccccaagacttcaaaataagctctgtgcaaatggcctcccagagctgcctgctggtttcttctgcgaggcctggcttctccattttggcttggaccatggcctgctgtcatttccacaacagttgcaggaagttgccaaatgcgttttctgtgactgccaggctggtgaccctgttaaaaacaaagcaacaacaaaaaaagcaatttcttcaattaaaattacaaaacagaaaaaaaaaaagatgtcacacttgggggaagctggttgaagtgtacttgatattctacatactattttcgcagttctctgtgaatcaatagttatttccaaataaaatgttaaaaaaaactttattactaaatcagaaaaaaacaacaacaaacaacaacaaaaaccaaagcagaatatgtggtgcactgttgagggaagtacagaaggataaaaacaagaaaatactgacacaactcagactccactgttgaaccttattttattttatatacttctaggtcttttttttttttttttttgagaagagtctcagctcactgcaacctctgcctcccaggttcaagcgattctcctgcctcagcctcccgagtagctgggattacaggtgcctgccaccatgcctggctaatttttgtatttttagtagagacggggtttcaccatgttgtgcaggctggtctcgaactcctgattcaggtgattcgcccgcctcggcctcccaaagtgctgggattacaggtgtgagccactgcgtcaggccacttctaggtctttttctacatgtttatatatacactgtatgtattctttaccaaagtgggatcataccataatgctgttttttttttgttttgttttgttttttgtttttgtttttaagacagtcttactctgtttcccaggctggaatgcagtggtgtgatctcggctcactgcaatctctgcctcccaggttcaagtgattctcctgcctcagcctcccgagtagttgggactacaggtgcccaccaccacgcccagctaatttttgtatttttggtagggacggggttttgctgtgttggccacactggtctcgaattcccaacctcatgtgatccacctgccttggcctcccaaagtgctgggattctaggtgtaagccaccacgcccggcctatagtgctgttttgtaacctctgtcagttaaccatctccattttttcacatcaataaatttcccatttgtccacaaaagtcctgtacagctggcagaggatatgtgtgactggaggccattaggtccttcaggttcttccagcctagcaccaccctttcttcccctttaccataggggcttgtcctagagaacgtctcaccttctggattcatctgagtgttgccttctgggggtgtcacttcatttgttcctctgtatcctgcatcccctgtaaattggagagtcaatctaaagttttgataagatcaagttaaatattttggcaagaaagcgtcatacatgatgatgctgggcacatcaggtgacatcacattttatatttaatggacaaataaaagttgtatatatttactgtgtacaacacgatgttttggaatatgtatatgttgtggaatggctaaatcaagctaattaaaatatgcattacttcactttttttttttttaagagacagagttttgctctcgttacccaggctggagtacagtggcatgatctcggctcactgcatcctctgcctccagggttcaagcgattcttctgcttcagcctcccaagtaggtgggattacatctgccaccatgcccggttaattttttgtatttagtagagacgggtttcaccattttgctcaggctggtctcaaactcctgacttcaggtgatctgcccccctcggcctcccaaagtgctgtgattgcaggcatgatacttcacttattttttgtgataagaacacaaaatctcttgagcaatttttaagtacacagtatattcttattgactatagtcaccatgatgtacaatagagctcttgaagttattcctcttgtttaactggaaatttgtaccctttgatcaatatctcctgaaaacaattttctctgcttctctcttatgactttgacttatatgtgtagatgccacatagaagtgatatcttccagcctgggcaacagagtgagattctggttttgtttgtttgtttcttttttttttttggagacagtctcactctgtggcccaggatgatctcggctcactgcaattctgcctcctgggctcaggtggtcctcccacttcagcctcccgagtagctgggactacaggcatgcaccactacgcctggctaatttttgtatttttttgtagagatgggttttgccaggttgcccaggctgatcttgaactcctgggctcaagcgatctctgcctgcctaggcctcccaaagtgctgggatttcaggcgtgagccaccatgctcagctgagactgtttctaagacagtctcactctgttgcccaggctggagtgcagtggcgggatcttggctcactgcaacctctgcctcctgggttcaagtgattttcctgcctcagcctcctgagtagctgggactacacgtgcccaccaccacgcccagcgaatttttgtatttttagtagagacggggtttcgccatgttagccaggctggtcttcaactctcgacctcaagtgatccacctgcctcggcctcccaaagtgttaggattacaggtgtgagccaccatgtctggcctcacacagaattttaaaaacacattttaaaagtgtattcaagggttgacatgcaatagaattagcaatttttactgctttatcaaggacattcctaagtgaaactggctctcttcttgttactgtgggcttgtaggggtgaagaatacagtgattactaatagaattaggtgccaccactttgattcatgctaaggagccagcagctttgtcctctgttgtttttgtaccatttaacgcaaatgtcacaggggaatgttaaaagataaagtcttactatcattatgaaaattcttggccgggcgcggtagctcacgcgtaatcctagcactctgggaggccgaggcgggtggatcatgaggtcaggagattgagacgatcctggccaacacggtgaaaacccatctctactaaaaatacagaaaattaggcgagcatggtggcaggcgcctgtagtcccagctactcaggaggctgaggcaggagaatggcgtgaacctgggatgcggagcttgcagtgagccgagatggcgccactgcactccagcctgtgtgacagagcgagactccacctcaaaaaaaaaaaaaagaaaattcttttgaccttgcagccccctgaaagtgtcttaaacaccatactttaagaatcaccaatctgttctatagacttcattcaaatgttgccaattttcctactaatatccttgttatggtctaagatctaacccaagagcacatttaaaaaaaatatcaacttttactttagattcaggcggtacacatgtaggattgttacaaggatatatttcgtggtgctgaggtttggggtatgattgagcctgtcatccaggtagcgagcaaggtacccagtaaggggtttttcaccccctgccccgtccctctcttccccctcaagcctgtcatccaggtagtgagcaaggtacccagtagggggtttttcaccccctgccccatccctctcttccccttcttgtagtctctggtgtctaatgtttcatctgtatgtgtccacgtgtacccaatgtatagctcccatgtgtatgtgagaacatatggtatttgtttttctgtttctgtggtaatttgcttatgatagtggcctccagctgcatccatgttgctgcaaagggcatgatttccttcttttttttttttttttttgagacacagtctcgctctgtcgccaggctggagtgcagtggggtgatctcggcttactgcaacctccgcttcctgggctcaagcgattctcctgcctcagcctcccgagtagctgggattataggcatgcgccaccacacctgactaatttttgtatttttagtagaaacggggtttcttcatgttggtcaggctggtctcgaactcccaacctcaggtgatccaccaacctcagcctcccaaagtgctggggttacaggtgtgagccactgtgcctggggatttcattttctttcagggctgtgtagtattctgttgtgtatatgtaccacattttctttattccactgctgatgggcacctaggttgatgccatgtctttgctattgtgaacagtgctgtgatgaaaatacatgtgcatgaagagctaacgtcgaaacatgttctatttagatgtcctctctccttaggctctctctctctctttttgaggcagagtctcactctgttgcccaggctgtagtgtggtggtgtgatttcagctcactgcaacttctgcctcccaggttcaagcaattcttgtgtttcagcctcccagacattaaagagatttacaggccaggcacagtggctcacacctgtaatcccagcactttgggaggccaaggcgggtggattgcttgaggccagaagttcgagaccagcctggccaacttggtgaaagctcttctctacgaaaaacacagaaattagccaggtgtggtgacacacacctgtaatcccagctactcaggaggctgaggaatgagaatcacttgaacctgggaggcagaggttgcagtgagctgagatcgcaccattgcactccagcctggggcaacaaagcaagaccgtgtctcaaaaaaaagggatgggaaagaaaattgaaaattactagagggttactttgattacagtattcagggaaggcctctctgaggatgtgacatgtgagccaagatctgaaggatgaataggagctgggcacaagaaaatctgaaagggaagagcattctgggagcggagacagaaagtgcaaaggctcagagatgagaatgaactcggcaacactacacagaattctgtccaacattcttcagctgctgaaaaacttgttcatgataaacttgggactcagacacatataacagacatcagttaaacacttatcagagctggagtcatgttaaagtagaataaaaatgtcaaactccagacatttccataaacactcaacatgcttcatttgcttaggaggaattttcctcatctctaaatcatggggttccagtttcccaaactctctgccaggaagggaaattgagctggaaagtgaaccatcagagaaaattaagcacccggctccaccctgagctttatcatttatcagtggagtcagctagacatttggcagaaaacggtgaaaataacatttgcctgtgtgtctaatggttccatatgcgttttgggttgggtggcatccagaagcagctgggaaaattccagttgtatcaggcattcatctcttctctctgtggctagccactcaggaagtcacatgggtaccttactgctccctaatttagctctgtctttaaaaaatatataaaaatgtttcttttttttttgagatggagtcttgctcttgttgcccaggctagagtgcaatggcgccatcttggctcactgcaacctctgcctcttgggttcaagcgattctcctgcctcagcttcccaagtagctgggattacaggtgcccaccaccatgctcagctaattttttgtatttttttagtaaaggtggggtttcaccatgttggccaggctggtcttgaactcctgacctcaggtgatccacccgcctcggcctcccaaagtgctgggattacaggcatgagccaccatgcccagccaaaaaaatcttccttaagatataaacacacacaaaaggcaaaaggaaggcaacttgaggaagtggctagatcaccatattgaacttcacagaatctgggttcaaggcccatttcatgcactaactgactcagccctctcatttgtaaaaatttacaccagtttcttacaaagtggcaggtactttttagctgtgtgaccttaggcaagtgagttcacacctctgagccttgacttactctgaaaataggcattaataatacttatttgtggtagacactgatggtttctacccaacagttgttttcccctcctgggtctttgcttccttctcccatgacagaagcagatgtggccagaccttcaccttcccaacctcctctgcagctaatgaatgcagcctagttctggccaatgagatgcatggaaaaattggctagggagcttctgtatgtagtgcctgtgattttttgttttcacatgattaataatatgatttcatgcagctattactagatggggccaggcgtggtggctcatgcctgtaaccctagcactttgagaggctgaggcggcgaatcacctgaggtcaggagttcaagaccaccctgggcaacatggtaaaaccccatttctactaaaaatacaaaaattagctgggcatggtggcacatgcttgtaatctcagctgctcaggaggctgaggcagaattgcttgtgcctgggaggtggaggttgcagtgacccgagatcacgccactgcactccagcctggatgacagagtgagactctgtctcaaaaaaaaaaaaaaaaaaaaaaaaagtacctggggctaaatagaaaggcccagaaaatccaaagcatgtgttctgctgtgtaagttggagcagtgcttttggatgcttctcagctaaaaatgcagattctggttcagtaggtctgtggtggagcttgagagatgttcctaaggaggaccatttagggttggctgatccaccatttcaacaagttcttcaagggctcaagatctctcccacttttctccctgccatcctggatggttggtgtgctgtccccaggcttgttgtgtgaaggtcacaaggtcaaggacacaatgccagcgaccacacccagacataactgaactttcaaaggaagaggagcatgtacccttccaggcatctctctatcagtggagaaatctttccccaggagcccattcttctgacccccacccctcaccccagccaatggctgccgtgtggcacaagccaggagtaccattttaatagactctctgggaatgttgtcccagaagttctagcagccttctcctcacatcttattagccagatgtgtgtcgtgtgcttcaagcttaagccagtcattggcaaggagagtagaatgactgtgactggctcaggccagaagtctcaaagtgaggtgctgggaccagctgtacctgcatcacatcgcctgggaagcttgttagaaatacatattttaggctgggcacggtggctcacgcctgtaatcccagcacttcgggaggccgaggcgggtggatcacaaggtctggagttcaagaccagcctggccaacatagtgaaaccctgtctctactaaaaatacaaaagttagccgggcatggtgatgcatgcctgtagtctcagctacttgggaggctgaggcagaagaatcgcttgaacctgggaggcagaggttgtggtgagccaagatcatgccactgcactccagcctgggcaatagagcgagactctgtctcaaaaaaaacaaaaacaaaaacatattttgggcctgcaccccagacctactgaattagaaagtctaggggtgaggcccagcaatggattctaacaagggctccagataattgtgatacacactagaattggccctggctgcgcattggaattatccaaggaactcttaaagctaccgctagatagacgtcagaatggtggttacccctgcaggctgcactggagtatagaccctgaagtagtgtgaccaacttgtggtttgcttgggagtttcttggttttagtactgaaagtcctctgtcctggaaaatcccctcaatcctgggcaaattaggatggtttgtcaccttaccttgatggagcaagagggaattttctggggtgttgaaaatgttctatcccatcatctgggtggtggttgcatgtgtgtacgcatgtgtaaaaaatatcaagctgagctgggcactgtggctcgagcctgtaatcccagcactttgggaggacaaggcaggaggattgtttgagcacaggagtttgagatcagcctgcctgggcaatatggcaagaccccacctgtactaaaaataaatttaaaaaaaactttagcattagccaggcatggtgatgtatgcctgtaggcccagctactaggcaggctgaggcaggaggatcgtttgagcccaggaggtagaggctgcagtgagccatgatcgcgccactgtgcttcagcctggacaacagagtgagactgtcttaaaaaaaaaaatcaagctatccgtttaaagtttgtgcaccttacacatgctactaagtgtacatcacaacttaaaaaaatactgatgtccaggttgtattccagattgattaagtcaaaatctctaggagaagatcccaggcattggtatcatggaatactctccagacgtttctcacgttcagccagatttgtgaatgaacacgatcaaatctccagggagttaaagtgaaggttctgattcagcgggtctgggtgggcctgaaattgtgcatttccaccacactcccaggggatgctgatgctggaccatgctctagggagcgagggccaggcctggttaacgtttaccttctggggcaggcagagggctgctcccctgaaacatcttggtggtcttagtgaggaaggaagaaagtggggctcattggagactagctgtggggtaggcaactcccgtggcattcaaagaattaaaggttagggtgaggttagaagcttacacctgggcaaccatacaaatgcaaaagctcagacatctgttcccaactccctgatgtgccaggagggccatgtttgcctaggttttggctctacttcctagccagagtcaggcctgaatacccagcgtgggcttagtttgcttctcctgaggttactcaggaacctgtctttctggagaagccagtgccatgtccagaggtgccctcctctgcgctgcagacaccacggagactgataacagggctgccagctggtttaattacccagatgggaagctggcaggtggagtctaaccttgacagagattaatgactccattatcttcctaggctatcatcccgtgcgggccccagtccggaatgtagacataaggtgtaaataaagtccttgttctgagggaggacatttttcattgtcttcagatgggaatttgcccccagaaacccttgactcaaattcgggaagtatctttttttggcagaataacctggtcgtttgtgggcatgtgacaggtctcctaaaggctgggccaaggcttgctggcaaaaccaatgttacttgtttccttaaactcattaagaaatacgtgcctgttgtaaacaacttaaagtgacagctcttgtctcctttcccactctttgaaggtaactattatacttaactctttggcgtatagtcttccaaatatatttctttttctgtttgttttcttctccagataaagtttccccccaaattttattggggcataattatagtacatttatttatttatttatttgagatggagtcactctgtcgctcaggctggagcgcagtggcacaatcttggctcactgcaaccttcacctcctgggttcaagtgattctcctgactcagcctcccgagtagctgggattacaggcacctgccaccatgcccggctaatttttgtatttttagtaaagatgaggtttcaccatgttggccaggctggtcttgaactcctgacctcaagtgatcagccctcctcggcctcccaaagtgttgggattacaggacttgagacactgtgcctggatggtggcacatatttaaagtatataacttgattggtctttaaaattattttattatttgcagagataataaatcttccttaataaataaaacaatcttccttcctcactttgttgcctagggctggtctggaactcctgggctcaagtagtcctcctgccttggcctcccaaggtgttgggattacagacatgaacctccaagcccagccccaatttgattactctttttttttttttttgagatggagtcccactctgtcgcccaggctggagtgtggtggcatgatcttggctcactgcaagctctgccttcccggttcacgccattctcctgcctcagcctcctgagtagctgggactacaggtgcccaccacgcccggctacattttttttttttttaatatttttagtagagacggggtttcaccgtgttagccaagagggtttcgatctcctgacctcgtgatccgcctgccttggcctctcaaagtgctggggttgagccactgcgcccggcctattattattattttttgagatggagtcttgctctgtcgcccaggctggagtgcagtggcgcgatgttggctcactgcaaactccacctccctggttcacgccactctcctgattactcttgacatagacccattaaaccatctctccaactaggatagagcacatgtccctcacccccaaaagtttccatgtgtccctttgtgattccttcctacctgcatcccctccactactgaacaacaactgtcactataaattagtttgcattttctaggttttatggaaatggaattatgcagcatatgtatatgcttttgcctggcttctttcactcaacataatgattttgagattcatctatgttgtagaaatcaacaatatgttgcttttaattgctgagtatatcccatggtatggatatatcacaatttgtctatccattcatctgtggatggactttttaagttgcttctaatttatggtgattacaaataaagctgctctgaacatttgtgtacaaatctttgtgtgaacagatattttagcttctcttaggcagatacctaggagtggaaagactgagtcatgtcacatggtaggtacatttaacttttcaagaaactaccgaactgttttccaaagtggtttatctcattttgtgttctcaccagccctgggtgagagttttatgcgctccacatcctcaccaaccctgtgatgatcagtctttctaatatttgccattctaatgagtgtgaagcggtatctcattatgattttaacatgcatttccctaatgtctaacgctattgagtatctttttatgtgcttattggccatttgcatgtattattttgtgaagtgtctgttgaaaattttgttgctctttcttttattgggctgttttcttattgttgagtaataagggttctttatatatgttaaatgtctaaaatgctacattttaatatagtggtgtcctcaaagtgggagtgatgaattttatctaattttgtcatggtcaggggaggagttgtgctctggaagcccatccatggggaaggtgaggttcaaactctaagataaaaactctagataaaattttaagtcctgctgtggatggctgttgtttctttctgcccagcatttacaccttttctgataacaactcaccccaatgttttcaagggagaattattcttccaccatttttagtacctgcggtttgggtgaagctgaccctaaaccctggctcctggggaggggtatgaccttggcctggccaatcagcattttcatcttcctggctctgtaatgtgcatgtaactcagatggatccaatgggattcaactttaggacttttgctggagtgactctttgtattggtctcagcttcctcctcagccacctccttcctcagccacctcctcagagaagccctccctgacttgcagaagagatgaggcatctctgatgtgctcagttagctcgctgatctttcatgcacagcacttatcacagctattaactaaatatttgtatgattatctgtgtaataaatttctgccctccagactgcaagctccatgaaactggggctgcatctcttttgttcactcttgagtccccagcattggtatagcctatccgtatattttgaacgtgaagatgacaggatttgctgaggaattggatgcatgctggatgtgggagaaatagaaacttgagacttaataaatacttgttgagtgaatgtaggaagctacatttgtgcatgagaaaactgaggtccagagaggtgaaatgactctccccaaatcgcacagcaagtcaggagcagagctggaatgtgaattcggggctgtccaacttcagagcttgtgctcttcctcagcaccctaaatgactccttgcaaactgaacataattttccacaacaaacactgcttaggcatggcagatacctctgaaataaactgtgttatttatctattgcttcataacaaattacttcccaaccttggtggcttgaaacaacatttattaactcatgatttctgtaggttgggatccaggtgtggcttagttaggtcctctgctttggggcctctcataggccacagtccaggtgttggctggggctgcattctcatcttaaggcttgactggggaaggatctgcttagggaaggatttgcttccaagctctctctcttttttgttggagggattcagttctgagggttcttggttgaggtccattccttgccacatgggcctgtcccttgggcagctcacagcatggcacctggttttatcaaaggagtgagtgagtgggaaaaagtgagcagaaaggaagtcatggtatcttgtagcctcatcatggaagtgacatcccatcatgtttgccttgttctattcattggaagtgagtcactaagtccagcccacacttcagggaaggaaattacataagtgaaaacaagtttgtgaatgcccaggtcagtgggagtcatctgagaagcctgcctaccacttaaactaagtctctttctcatgtagcttaacttctggtcaggggaagtgcacaaaaagcaaacaaataaataaaaatataacacatcagatgatgctaaaatgcttgcagaaaatcatgtggaggaggttatggagggctgggtgcaggaggagactaagcattcttactttatatcaggtggtccgcagagacctgggtgagagggagacatctgaatagagagctgaaggaaatgaaacaacaagccaaaaggatacgggaaagagcattccagcagcaagaacagcaggagcaaaggccccgcatcacaaacctgcctgaagtgttctaagaacagcgaaggtcagtgtgactccagtgatgatggcaagagagagagtaccaagtcatggggttagagagataacagggcggccgggcatggtggctcacacctgtaatcccaccactttgggaggctgaggtcaggagtttgagaccagcctggccaacatggtgaaacctggtctctactaaaaatacaaaaattagccgggtgtggtggcgggtgcctgtagtcccagctactcgggaggctgaggcacgagaattgcttgaacccaaaaggcggagattacattgggttgagatctcgccactacactccagcctgggtgacacagagagactctgtctcaaaaaaaaaaaaaaaaaaaaagcgataacagggcgtcgggtcatgtaggcccttgtagggccactgagtgagatgatgagaaaacattagaagtttctgagcagagaagggatgtgatctgacttaaatttaatagagtccctggctgctggttggaggacagaccttgggagacaaaggtggaagaaaacaaattatgaggtttttttttacctggttcaagtgagccatgatggatatttgaagaatttgctaagggtgacaacacagaggaatccaggccaactacaagatattcggcctgagcaactggaaagatagagctgctagtaactgatttggggaaactttgtaaggtgaacattgactgggagcaaaggatgaaaggcccctttattttattttattttattttatttgtatgtgtgtgtgtatgtgtgttatttgttttgttttgttttgtttttttgagacagggtctttctctgtcactcaggctggagtgtggtggcgcaatcatggttcactgcagccttgacctcccaggctcaagagatccacctaccttagcctcctgagtagttgggactatagatgcatgccaccacacctggttaattttttaatttttttgtagaggcaggatctccctatgttgctcaggcaggtcccaaactcttggcttgaagtgatcctcccattttggcctcccaaagtgctggaatcccaggcgtgaaccaccacacccggctgaaaggtggctttggcgctgctaacatcaaggtccctgtgagacatccgagcagagatgccaagttggcagttggagactagagtctagacttcacgggagaggtccaggctggggatgtaaactcagaagttgtcagtttattagtgtttagagccatgagtctggatgagatgggagagagagaagaggcccaagcctgagctttgggcacttgattaattcaaagccacaagatgaggaagaaccacctgaaaagactaagaagttgtggacagtgaggtaggaagagaactaagagaagaaagtgctgaatgacaagcagcatcatggtagctggccatgggaaatggcccgccaaaaactgcacactgcggttcacactcttgctcggccccagccactttcctctgggctgtcaccatagaactaacaaaaagcagcagaagtggcagcctgccttctgaggccaggtcacaggaaatcttgcagcttctaccttagtgtttttgaatgctgctctgggataagccagttgccatcaaagaagtttgactactctgagccaccacgatgtgaggaagcccaagctaagcatgtgggaagcccaggatggagggaaaagatggccaaccagggccatggttgttccagccatctcagctgaggcaccagccacaggagtgaagaatttgttttagacatccagtccaatcaaaccttgccatgactttggctacagctgcaccagcatgagaaaccctgagggagaaacccacaggactaggagagacagtgacacactgtcattttaaggctctatattctgggatggctcattctacagtggataatggagacaggagttcattgcaaagggagactgaccagtcccctgcccgcaacagagcacagccctcttcacccagacccatggagaggtggctgagcagacctcagctgggcagccctccacactctgaaggctccccctttcctgccttagtggcaagaataataattttctctttgtgcccagagagctggcaactgccaagtgccctgctgtccccagggcccttacaaaaagactgcaggggaggtttttctgagaactgggtcaccggttacttagatgcttcaaacctggcagaacagagaaacatcagataaaggagactgggaacttcataggaagctgctggtccttgtcatggggacacaccatgacaagccaccagagagtggctgcctgccctctctggacccttatgtcatagggacctcctctcttctagagagctctctctttctttgtaaatgtttgtaaatctttctttgtaaacattttggaaagtatgcattaatcaggccagacacgatggctcacgcatttaatcccagcactttgggaggccgaggcgggcagatcactcgaggtcaggagttcaagaccagcttggccaacatggtgaaaccctatctctactaaaaatagaaaaattagctgggcatggtggtgggcatctgtaatcccagctactcgggagggtgaggcaggagaatcacttgaacccaggagaaagaggttgcagtgagctgagatcacatctgtaatcccagcactttgggagtctgaggtgggcagatcacttgaggccaggagttcgagaccagcctggcaaacatggtgaaaccctatctctacaaaaaatacaaaaattagctggatgtggtggcacatggctgtagtcccagctactggagaagctgaagtgggaggatcacctgagcctgggaggtccaggctgcagtgagccgtgattgtgccactacactccagcctgagtgacagagtgagaccttgtcttgaacaaaacaaaacaaaacaaaacaaaacagaaaaaaacctgtccttttctcccactgcctgttcagttccccagaggcaattgcttaacatttctttcacatttattggaataggtaacacaaggcgtgtgctaaaaatttcaaaaggtacaaaaaaggtaaagagattaagtctccctccttccttctccccacccagctcctctccctaaagacaaccacttctaccagtgtattacatctccttccagagatatgctatgcatatgtcagcatataatataaacagccttaaaaaataaaacagggctgggaatggtggttcatgcctgtaatcccagcactttgggaggccacggtgggtgcatcacctgaggtcaggagttcaagaccagcctgaccaacatggtgaaacgcttgtctctactaaaaatacaaaattagctgggcgtggtggctcatgcctgtaatcccacctacttgggaggctgaggcaggagaattgcttgaacttgggaggcggaggttgcagtgagctgaggttgtgccattgcactctagcctgggcaacaagaggaaaacaccgtctcaaaaacaaccaccaccaccaacccagaaagggtaacttgctacaaatgctgttctgcaccttgcttttccacttaaccatatattttgaaggtcttccatatcagtaggtaaataactgctttattattttaggggactgcacaatattccactgtagggatggaccgtaattcatgtaaccagcccctactgagggacactgaggttgatgccaaccttttgatattacagtgaaacagcaaataatcttgtactcatgttttcttgcacatgtatgcctctctcagtaaagattcctgaatcaaaagacgtgtgcttttgtcattttttaaaatttttatttattcatttatttttgagacagggtctcgctctgtcacccaggctggattgcagtggcacgatcatggctcactgtagcttgacttcccgggctgaagtgatcctcctgtctcagcctcctgagtagctgggaccacaggtgtgtgcccccatgcctggctaatatttaaattttatttttagtagagacagggtcttcctatgttgcccaggctggtctcaaacgtctgggctcaagcaatcctcccgcctcagcctcccaaaatactggaatcccagtattataggctgtgcttttgtacttttaataggtattgacaaaatgagactgtattgatgttcttgtttgcagacttcatacttaagtgcccctttccctacaccttccccaattctattcaaataaaaatcaacatctttaatctgtgctgtagaattggtaagaaatgtatctctgcacttttacatttgaaatatattgttagaaggttgagcatcttcatatgcttaattgtcatggcaaccacttctagcctgtgtagcgatttcttctagttgtttatttccatagagctaaataatgtttgaatgtagccattcattgatttatcagctttaggtgttatctattgatttttgctccaatacatgaggatttagctcacttacagtgtcatccttgcacctcctctatctttctacccttccttccttctctcttttttatttttattttttttttgagacggagtcttgcttgttgcccagggtagagtgcagtggcacaatcttggttcactgcaacctctgcctcccaggttcaagtgattctcctaccacagcctcccaagtagttgggattacaggcgcccactgccaagcccagctaatttttgtatttttagtaaagatggggtttcaccacattggtcaggctggtcttgaactcctgacctcaggtgatgcacccacctcgtcctcccaaagtgctgggattacaggcgtgagccaccgtgcctggtctcttctctttatgaaaaatattgctggttttccatttatagtagtgatatatttttttcctttccttttcttattaaaatagactattttttagagaagtttttggttcacggcaaaattgaacagaaagtacagagttctcatatattccctgctcctcccacccctcagtttttcccactaccaaggtcctacaccagtggtacatttgttacaatcgatgaacctgcactgatacatccttatcatccaaagcccatagtttgccttagggttcactcttggtgctgcacattctatgggtttggacaaatgtacaatgacatgtatccaccattatagtatcatgcagaatagtttaactgccctaaaaatcctctgtgctccacctattcatccctccctccagcctaaccccaggaaaccactgataattttactgtcttcatggttttgctttttccacaatgtcatgtagttggaatcatacagtatgtagtctttttcagattgtcttctttcagttaataaaatgcacttaagtttcttccacgtctttttgtggcttgatagcttatttctttttagtgctgaataatattccattgcctggatttaccacagtatatttatccattcacctcctgaaggaaatcgtggttgctcccaagtttggggaatcattaataaaacttctaggaacatctgtgtgcaggtctttgtgtggacataaattttcagctcatttgggtaaataccaaggagcatgaatattggatcatatggtaagtgtacatttcattttgtaagaaactgccaaactgtctcccacaatggctataccattttgttttcctaccagaaatgaaaaagagttcccgttgctccacgtcctcaccagcgtttaggattttaatcctttgaataggcatgtagtgttatctcattagtattttcatttgcaatctcctaacgacaggtgatgttgagcatcatttcatatgtttatttgccatctgtatatcttctttggttgaggtatctgcttagttcttttgcctattttttttttttttttttttgagacggcgttttgctcttgttgcccaggctggagcgcaatggtgcaatcttggctcactgctacctccccctcctgggttcaagggattctcctgcctcagcctcctgagtagctgggattacaggtacccgccaccacacttggctaattttttgtatttttagtagagatggggtttcaccatgttggtcaggctggtctcgaactcctgacctcaggtgatccacccgcctcggcctcccaaagtgctgggattttacagacctgagccatggtgcctggcctcttttgccaattttttaatgaggtcttttgtcttcttgttattgagttctaaaagttctttatatattttggacagcagttctttatcaggtgtgtcttttgcaaataatttttcccattctgtgggtttggtgggtttgtcttctcattctcttgagtgatgtggcatttaaaaaaataaaattactttaagtttaaaaagcaagtccatttaaagagaaacacccaggaaataatagccaaggtggtagaatatggtgaaaaaatgaaagggcacccaagagcctcaggtttgggcaatactgatgacacatagagcctggttccctggcaattattatggcggttactactattttaataatattagcagttacggttggtatttttgctattacaattaatggcataggggctgtatcgcccctgtcttcctggaacctggaggcaatgaggagctctgcaaagttgttgagattattatgaccatatctgggtatttcaccactacaaagagctgcgcaaagtttggacggtaggaatcggggtggacatcagctcggtgacaggtaggaggtgggtccgaggaggggtcgggtctgggagcctccgcccccaactcaaggcaggctacacaagatctgtctccgttggcgtcccggtacctagcttgagcccgaccatgggcatgcgtggcgtggcgcgaatcctgtccctgtcgctcgtcctggccgcggtggccacgggggcctgggagcgggggccgctgggcgtgctcttgccctggcagggctccgccgcgctgggccgctgctgtcctggccgtgacccgatgtttgtcgcccgcgggcccccgcgctgcttctgcgaccaagcgtgcggcgcggcgcggcgcgggactgctgcgcagactatacgcgggtctgcccaggtgcacccggggaaaggcaaggcactagcggaacgctcggagcggaggggagctggggcgggggatgagcggaggaagggagcccagcacctagggggctctgggcttggaggggtcacacgagccgagggcggggcgcggcgcttggggactggaagggtgcgccgcggggcagacgggacgtgcagggggtcgcgcgggcaaggagggacgcagacactcaggacctaaaggggaagcactggctgtggagctgcgagccgagaaagacgcgcaggttatgaacctgggtgcgttcatctcgggggacctgaaggagagggactcgtggagagttgaggggtgtttcggaggaggggcgcaaggactgctcacaggacttgaagggcggcaggaaggtggaggattcggcccaggtgcgggacgcaggcggtggaagggaaatgagcacaagaggcgcaggcaggaaggagagcgcctggtgcgagagaggaaggagcgcacccagtaagcggtgtcgggggggtcgtgaagcttggagggcctcgaggggagggaggcgcttgggttgaggtagggcgccagatttcgcaaatcaaaatacagcacacccagttaaactcgaatttcagataaacaaatctttctagagaaaaatatgtcctaaatatcgcatgggatatacttatactaaaaaattatttgttgtttttctgaaattgaaatctaactcggagtcctgtattttatctgagagccccagctggggacgggcgcggggccaagagagctgcgagggaggaggggttgcaagcttctttcgggcggaggggtcacaaggcgaatggagaaggtgacaaggagcatggagaaaccaagaaaagggctaacgcttggagagcaaggatggaaagacgctcaaagcggaggcggaacggtctgagtgattccaaaactagtgtgtccaagctggttagaactcaggcaggcgggtccagaagccgaggggcctgacagatacgcaggtgaagtccatctgtggtccgcgtgctgggcgtggccaccgggctagtccaagcattcctggtaaaggctcctccagagtggtacccacagcgctctattaagggctattttagttgagtcattagtgggaaggacgctgcctatcccctccccccccgccaccccactcccttcttctagagatggagccttgctctgtcgcccaggctggagtgccgtggtgcgatcatcattcactgcagcctcgaactcctgggctcaagcgattcttctgcctcagcctcccaagtagctggatgacaggcacgcaccaccatgtctggctctctatcctttttaaatcccagaagtaaagttttcacacccactggagacaaaaaaaaaatctaaattctgtcaccctgtaaaacggttatgacccaactttcctatgtcagggaggaaagtgattgattgggcccctctaccgtgtgatatcactagagcttccttcagaaatttgttttaaaagacagagagggcgcttttaaaaaaatgcataatgggtcgggcacagtggctcatgcttgtaatcccaacacttggggaggctgtgggaggatcatttgaggccaggagttcgagaccagcctgggcaatattggaagacccagtctctacaaaaaattaaaaaaaaattagcctcaaatggtgatgactgcctgtagcaccagctactcaggagactgaggtgggagaatcacttgagcccaggaggttgagcctgcagtgagctatgattatgccactgcactccagcctgggtgacagagcgagatcatgtctcaaaaataaataaataaataaataaataaataaaaatgtaagggacctaacatccattaatcacctatccctctgtgcccagaagctgggctggatgtcccctggaacctgaatacattctccctgccctctggggttcaggtatggaataacatccctgtttagcagtcaagaaaagcaaggctcagagaggagagggctttgggcagtcaagaattcccagccagtggaggagctgggtctgattctgagtcttctagctccttgctgccaggagtggccaacgttggaaattcaggcagcagtgagatgagaaagtaattttggatgtggtgtcttctcaagccataggcaaaagagaactccttccagattaaatttggggaaggactgcctgggggtgcttttgtactggttggttttctgtgtagagagttcatgcagccgcgggtctgtactgattggagctgaagtcccaggttagcaccaccaacaggggctcccctgccacagcgcaggagtgggggcccaggatgggtccaggcaaaggcatcagtgatactttctcatggtctgaccgacacccacagaatcacacaatgttagcccctcccaagagatgtcctttctatacggagtgggggctggaggaaccaggagcctcaaagctttgctttcacctttgttttgctcttttgggatctgcctccttatctggagcagggtcttgtgaagagacgcagggaaaagttcactttccacctcccaggggagcaggcaggaggggactagttaggaggcaaaagatgtagagaagtatttgcttttttcatgggctatttttaggagataaagtcaactgccttaagtgatcaattgtaatagagggagatgttgaagatgacttaaaaaacaaacaaaatccgcaaacaacaaatctaatatttatgaaataccaaatgtcaggaaggtactattttaagtgcttgaagtaaattgtctcatttaagcctcataataacgctatggaacagtgttatcatgtctgttttacagatgaggaactaaggcacagagaggttaagtgacgtgttctgggttgcacagctcttaaacagcagatctgggatttgcactccagcagtctgactccagatctcaatattgtatagcagctcaagggtggcagagactcaagaatgttaggagagggaagcttgagtctacaggtgtaaggagaccccttgacatcttccccatttagttcaattaaaattttctttttttttctttttctttctttccttccttctctcttttcttttctttttctctctctctttcttccttcctttctttttatttttcagggtttcactgtgtcacccaggctggagtgcagtggtgcaatcatggctcactgcaacctctgcctcccaggctcaagtgatcctcctacctcagtctcctgagtagctgggactacaggtgtgggccaccacacccagctttttttttttttttttttttttttttttgtattttttgtagagatggagttttaccatcttttccaggctggtctcaaactcctgggctcaagctatcctccagccttggcctcccaaagtgctggaattaccagtgtgagcctccacacccagcctcaattacaattggtggccaccttctgtgtgcccaattcagctagaagcactgggggatggaagcaaggctggagttctggtacccctcaagcttattgtctatttttgggagacaaggtagttgggaaaggaataaataatttcagtctgagcaaggtgaagcttggaaatgattggtgaggatggtgtggaggcagggagagagtggggctggagtgattagtaaggccttgaaagatagacaccactgtattttccaagttatttacagaatgtttccatgtattctatacttcttaaatatcatctcaaccctgtatggttgatgtccctacatatacacttatgtgtttcctgtagacttagtactcttagggttgtgacacaatttaacttaagttaacaaggatatttattggcttaggtaactaaagaacaacccagggattccagagcttcaggcatgactggatccaggggctccaaggatgtcatcaggactctatctctttccattcttcggcttttcttgtgttaacttcatttacaggcatgctgtcaccaagtggtagcaaagctagtggtcaaagacagtagctgtaaactgccatccttaatggattgagagcatttttccccagttccagccaaaatcccagggctggttctcatgggctcagtttggattaaatggtcattgctgacccaatcaatcactgaacccagggagaaggaatatatcaactggccatgtgggggtcacctgcctcataccaggaacgagagggtgcgatcagccctgtccaaaccatgtggattgagagtggggagttttggtttctcagaagaaaactgaggtggtattcccagaagatgggggaaaggaggctgggagggtactactcagctgtgggagaccacgtgctttgggaaactttgggtaaagtgtgctgagatgttgaataggaggagggcacggtaaatgactgtggatgagttgcaggaaaatgtagatttttagccactgagcttgggggtctccatctatgatccactgtcaaaaaagatccttcgtgaaccccctcaataggagatgggaaccactgagggatttcagggaacaggccagaactgtattctagaaaatccttttggtagacaataaggagggcagatggtaaggaggctgggcagtgtggttcagaggagaaagcggggtttggataatgcagaaagacattccttggctgggccccgtggctcatgccagcattttgagaggctgaggtgggtggatcacaaggtcaggagtttgagaccagcctggccaacatagtgaaaccctgtctctactaaaaatacaaaaattagctgggtgtggtggcacgtgcctatagtcccagctactccggaggctgaggcaggaggatcgtttgaacctgggaggcggaggttgcagggagccgagatggtgccactgcactccagcctgggcgacagagagagactccatcttaaaaaaaaaaaaaaaaaaaaaaaaaggtgttccttcatgagcctgggcctgtaagggtggggtgaagcgattctaaggggtctgtgggaaatgtggtctggccatggcaggctcagctggcacgatgtcatctgggtatccaggactcagtgagcagccttaccaccgccctacccctttctgtaaggctgggaagctagaatttcttctttggtcaggaaaagtgggctgggctttgctttgagaaacactgctatctggtgttgcctttttgcaatgtcagcctgtggttatatttcctttgttgttgctaaggcaagatttgctcactcattgttcagtggcacatcacttcctgagttgctgtgtgccaggccctgtgcttggtgatgggatacagcagggaacatgacaaatgaggaccctattgttgtggagctgacactctaatggaggaggcagacactacgagaataaccacagatgtactgagtttgtgatcctgggcctatgcgaggggtgatgatggttccctcttgtgtgcgtgctgccagtgagacgggtagaacacgtgcagggtggtgcctgcctaattttccgcaaaatctctcacctgcctggcaggcagggcaggagatcgtggtggactttggggataccccttggtccagctgtccagccagtgcctgaatctggtctgcagtcttcctgccaggttttttagccacattgtgaacactttcagtgacacaaaactcattcttctagcagcttcttctactgtagataatcctttctctcctgggaaaccgcaggagccatcatgcttctgccctcacccccacccagagagatgggcagtcatccttttgaaacctttggtatcaccacgtcacatctctgctcagaactcggcaatggcttttcgtcatgcctagaataaaatctgaactccttacaacagtcctcaaggccctatatgctatctttgtcccctccctctctgatgtcacctcctaccacttttcctctggcttattttcctgcagcgacactggcctcctcactgtccctctgatatcctacctttaccctgcctcagcgactttgcactgcctgttttgtgcctggaatacagttcccttcctacacagttcccttcatcactttcttgggggctctgttcagatgtccttgtcttggaggacttccttgactcctgcctaaaatagtttcttgttacaccacccttggcactctttctttttttccctgcctctctctcaaccctggccactcttgacctgctgttttttctcaaagcacagatcactagttgaaattacatggttgcatgttattgtttattgtctgtttcccccactgaatgtcagctccttgagggcagggctgtacctgttttggtcatctgtgttcccagcacccagcccagtgctctgcacacagtaggtcctaaattgttgttgaacgaatgcataaagaccattgaactgggcatttacagtatggccagtgctttgcattcgccattgcaacaaacccgagactgtggttcaaatccaggtttgtctgactctacatccttggctcaacttagggattctgcctcttaagccccagtggcctcatctctgagctgggtttgacaatagtgcaaacacattaggagttggggacctggcaagtgacagatggtacccccagaagggtataatagaaaacaagggctctattcacagaggtgggggcagcagtacaggacaggaggaaatggtgttattggagcctgtgagagtaggatctgcagccaagggcccccttccccaaaatgggggacaataaacaccttgggtgcactctcctcctgccctctgctcctctcatccccgctggtgttccccactggttcaactctactggcagccagggagaggctgggagatgcacaggcttgctgggggttgagtatggagagggagtacagagtttcaggagactgttgtgaggattaaatgaagtcatgtatgggacttgcttggtttagcatccaaagcacaatgaacggggttattagatggatgatgaaagcacttgatcagtcttaggttgccacactgggtgtctcccctccctcctccttcttgccctccctctttctgtttcctttcttctcttgtttaccttcctttctttctttttccttccttccctctgagcttttcaactctgctaagatgggcagattgaaggattgtttgctccaagaaaaaaattttaaacctctgagatttatgcaaagaatatgtgacttcctgaccttccagaggcactgctgcttgtctttggcacaataacgccattccttcatcaaggatgcacatgattttttccctcttcacattttcacgttgctgaattaggacatgtctcatagctgggagggcttttcctgaagacagacctcatctttcttgttaaacgctgtgtctccagcacccaagacagttctgggctcgctgcagatgcttggtaaatatttggggtatgagtgaattaattctgacagtggtggccgccttgcatgtgcagcaaatgtgtgtgtgtgccgctgacaaaacttgctggcacatccgtagaaagtctctcgctggggaagtgcccagattccgtttctgctagactgcctttccctgtctgatttgctctggtcctgatctgggagtgtggacttggaatgaagaagtgtcggtcccagcggggacatcattagaaataccacctgtggtagacatgtgaagcacctcaaggatgggggaacccagcacgttccttttgtgatgatgaaatatttccgacatacaccaccaatgtagagagataatacaacaaaccctcgggaaaagctaagaaacaaaccttgacaattgccactgcagtgtctgtttccctcctgtagtcacctgctgtcccactctccccagagattgtcacaatgctgaatttgacatttaaaattcccatgcatatatgggggtatgtgtgtgtttatgtacataaacatacactgtacattcttttttttttttttgaaacagaatctcgatccgtcgcccaggctggaatgcagtggcacagtcttggctcactgcaacctctacctcccaggctcaagtgatccttctgcctcactttccctagtagctgggactacaggcgtgcaccaccatacctggctagtctttgtatttttcttttttggtagagatgggatttcaccatgttgcccaggctggtctgaaactcctgggctcaagcgatcctcctgccttggcctcccaaagtgctgggattacaggtgtgagtaatagcgcctggctacaggactttcttgtgattcacagtagttatgttctgtaaagttgccacaaagactgaattaaccaatactgaattaaccaatggcccctaggggaaatatgtacacacatatctcacttagtttatactttagatcctaaaaacaactcatcctggtcaattccattttcttcattttaccaaagagtgttaggaagtgttaagagactcgcccgaggctgcctccctaacagttgctggagttgggattcaaaccccatccaactggcccagggctggagcttcttgcactacatagacctgtccctactgtctctgtcctctggtaacatctgtatgaagctggaacaagaagacagagtggggccctgtttaacttcagcttggaacctgcacattgagttactcaaatttttcactaatcttcgcttgtctgtgagtaactataaatgtgctgcaagtattgattttagggttaaaaataatttcagcaaataagcaaagtagcaaatacagaatctgtaaatcatgaggactggctgcatatatatgtatttactatgcctgtatgaatgcctaaatactttatagtaccgttttgcagttttaaaaaactatataggccaggcgcagtggctcacgcctgtaatcccagcactttgggaggccgaggtgggcagatcacttgaggtgaggagtttgagatcagtctggctagcatggagaaacgctttctctgctaaaaatacaaaaaattagccaggcatggtggtgggtgcctgtaatcccagcttctcaggaggctgaggcaggagaatcgcttgaacctgggaggcagaggtagcagtgagccgagatcacaccactgcacttcagcctgggcaacagagctagacaccgtctcaaacaaacaaacaaacaaacaaacaagactgtatataaaaagcatcacattagacatgtgaatccttttgcaagtaatttatttccccttcaggttactgacagtgtagctgtggctcattttcactgatgtagaggaatagttagtgcttattaaacacctgctatgtgctgggagcaaatgctttatatttcatatttggttgaacccttaaggccaccctatcagttagatactattcttattcccatttgacaaaagaagaaattgaagcatcagttgccctaagtgcttaggaaatgtttattgaaggaatgagtgatggagacgacctaagtgatcatcaataagatgattggataaaggtggaattctaagtttaggtgaacatatgaagagttgtcatagggaaactttcaaggaaggcatagactgaggtttgcaagagttctagcacttggtgtggtgttttgggggttcagattgtggggaaggtggagaagacctggatgctggctagctaaaccccacagaggtctcccttgcagacaccaccttctcttccagcagtctcctgcactgtggcacagtggagtggctgcagtcgctgtgtgaaacctgccaggtctcctaccatgtacaccggaggcgtgtcctgcaggagccgaggaatgggggtgtccccttcccgctgctggaagagcgggctggctgtgtggagtactggagccaccagggagtggagtgccagcagtcattgcatgagtggggatgggccccaggggtggctctcagtgggaacagtcaggctggactgcagggccctccatgagttcttgggtagggtctgagtttggaatggggctttgccttcctttgccctgatcccccttctcatcttgtgaatgagttcagaagctctgaactccactgggcttctcagtcttctttctgctcctctccctgtgtgaatcagtcaggactttgtatgcaggtgataggagacccaacttaacctgaactgagcaaaactgtgtggctcctgtaactaaaattccaggggctgcattcaggcatggctggatccaggagctcaagcaatgttgccaggaatctctctccatgtctcagctctgttttcctctcagttggcctcattctcaggcaggcttttccctgtaatggtctttgacagcttcaggcttccctctaaccagcctaacagctgaagagaaggcctctttccccatagttccagcaaatatcctaggatatttgtggtggtgcgcacacccgaagtcccagctgctcgggaagctgacgcaggaggatcacttgagcccagaagtttgaggttgtagtgaactgattgcactacaagaccctgtctctagagatcaatcaatcagtcaatcaatcaaaaggtcgttctgactgttatgtggacagcagactgagaggggtcagagggaatcagggagcctagggaagaggtggctgcaatggttcaggcaagagactatggtggttgaaccagggaggtggcagtggggtgatgaaaagtgggagtgttgcttcctctgcttgaaatccttctccctacccccagccactcccatccagccattcctgggtcatcacttcctgtaaagatgtcagtttccctgaggaagatcgggaagatcatcctgacttgctaatatgtgccaagtgcctcaccacatgacctgactctgtgaggtcagtgttactattctcttcttacagacagggaaaccgaggctcaaggaggtgacaaagcttgtccaagtcacatggctattgactagaggaccaggaccctcccattctgacctttgatatcacccacctacaatcttttcgttgtactgttttttgttgttgttgttgttgtttgttttttgttttttttttttaagacaaggttttgctcttgttgcccaggctggagtgcaatggtgcaatctcagctcactgcagcctcctcctcccgggtccaagccattctcctgcctcagcctcccgagtagctgggattacaggcacccgccaccatgcctggctaattttttgtattttttgttgagacgaggtttcaccatgttggccaggctgatcccgagctcctgacctcaggtggtccacctgcctcggcctccccaagtgctgtcagaatgtagtaaggtgatatatgatgagcacctactacataagtgctcaataaacagcagctgaattattttctttgctcaccgttacagccatgaggctctgatctttatgactgatcccttgaatcttctttcaaaacatctcacctctgtatttgagggcttgtcccttcaccatagcatgagagcaacagctgcatcacagtagctaacaatgtcaagcaaattacaaagggaagaaacactcactgagtacctgccttgtgccagaccctcgaccaatgttacattacattctgacaataacaccaggatgtagatactgatattatccccattttgcagttaagaagaatgaggctcagacaggtgcagtaacttgatcaaggtcactcagctataacaaggggagttgggactaacctgggcttagctggggctctccttactgctctaggtgacaccaaaagtacaactacagctgttggaagagggaagggaggctgtgtgttagggattcctaaggaatcacgaacctcttgtgaaatgattatcaattctcttctatgttctcctctgtttgatctagaaaggaagaaacttggaagctggccaagtaaaataattttattcattcatttgtctttctatcaatccatccccctatacctcctttcttccatccttccattgttacattcactcattcatctattctcccatccatccatccatccatccatccatccatctactcgttcatctagccatttccactcatctctctgcattcttctatcttcttccattctaccttcttccattcttctatcttcccatccatccatccatccatccatccatccatccatccagctatccatccatctatctacccatccattttttattcattcacctatccatccacttgtcaactctccatccatcctttccattcatcctctcttccacccatccatctttctactcatctctctgtctctccttttcttccagcctctcatcttcccatttatctacctattatacatccattcttcctttcttccatcatttcagctatctatccatttattcatttagtcattgactttaaacattttattttcttcttttaaaattatttaattaattttttgcctttcctatggtgctgatagttattgactcttttttctttgttttttttttttgtttgtttgtttttctgttttttttttgttttgtttttttgagtctaggtcttgctgtattgcccaaggctggaggacagtgatgcaatcatggctccctgcagccttgatcttctgagctcaggtgatcctccccttttagcttcccaggtagctgagactacaggtgcacgccatcacatctggctaatttttgcaggatgaggtttcaccatgttgcctaggctggtctcaaatttttgggctctagcaatcctcctccctcggcctcccaaaatggtgggattacaggcatgagacattgctcctggctgactaactcttttatctactctattaaaaaaatcattcacttattcattcagcaaatcattcattcaaaaagaatttttgagaccacaccaggccctgaagtctcagagataactatgatcctgcttccagcactataaagggcactggtagggattatctacccagttcaaagatcctacagtctctttagggctgtcttgtaagtgacttggataccagaggtaccaagctcggtgtccctatggtgccatagcctgggatgtggtccgccctaactctgttttctccttgacccacagtccctgctttgataaccacaggcagctacgggaaagagtgggaaaagtgagatagtcccaagaaacaggcaacagcagggtaagtgaaaatcaatcaacctaaagtcaaactaaaatttgtgaacatgtttccttgaactaagtttcttttttttctttttctttttttttttctggagatggagtcttgctctgttgcccaggctggagctcagtggtgtgatctcagctcactgcaacatccgccacccgggttcaagccattcttgtgcctcagcctcctgagtagctgggattacaggcacacaccaccacgccaggctaatttttgtatttttagtagagacggggtttcatcatgttggccagactgatctcgaactcctgacctcaggtgatctgcctgcctcagcctcccaaattgctgggattacaggcgtgagccaccgtgcccggcccaaaatttcatttatcacgtctttctcttactttggcaacatccatatctccccgtttgtcaccttgttacacctgcaagctcattaacatggattttaaagtccccaatgattggtctccattcaacttcattcattcacccattcattcaactttgattgagtgcctactatgtgacaggtactgtgctagtccttgggttatggcaaggaacaaaaaagacagaaatacttggtcctcattgagtggacagtctagtgggaggagagagacaaaaaacaaataacatgttggagcctaagtgccatggagaagataaagcagggaagggggtaggggtgccctgagaaggtgacatttgaactaagatctggaggaggagatctgggggaagagtgtgcctggaagagggaaacagcaagtgcaaaagttctggggcagggcatgcctagtgtgttcaaggatcagcaagaaggcgggtatagtttgagtgcagggagagagtaggaaatgaggttgaaaagataacaaggtaggaggtagatcctgtggggcctgtaggctgtgttgaggagttgcgcactttctctcatgaggtgggagtcatggtagggtttttagcagaggagtgacatgatctgacttaagtcttcacaggattccttgggatcctacttggacaatggatagaggagaagcaagggggtaactcgggagaccaatgaggaggcaattgcagtggtccaggcgagggaagaaggtggtttggaccagggtggtttcgtcgtaccttgtgaaggatggattgtggggactggcgacagatcagcgtgttgtgggatcgcggagctgaggtcaaatttccaggacagtgcctggctcatgataggtactcagtaaatatcagttgaaagaataaggtctgaactaagtcagtggcaatggagatggacaggagaactaaaagggttaggattcttttgattgcaagtgacagaaacttagctcagactgcgtcaagtgaaaaggtgaagtattggtttagataaccgggagggaagttctgaaataacattacttcaagcagggctggcgccaacggtgtgtgtaaggccgtcagggctggctctcgtcccctctctttctgtcactcgctccatgggttgactttattctcaagcaggctctttccctgtggtggtcaagatgggcatcttgcagagattgtggggataagcagccccacatcctcccagatcagtaaccccaaaagtgtcctcttggaagtctcagcggatcatatctggaggagaccccgattgggtctgcttggatcctgggcccatccctgaaccagtcgtcgtggccaggaagatggggaactctggtcggtcaactccaatcacatacccgccttagtggcagctgtgggagccacggccaggccggctgagtgatggcccctccaagaccatagggcgagggcaagaagtttccaaacaaactgccaaaaggggaagagaaattgtatggggaagacgcaatttctagttatcacagacttctggtaggggacagattcccgaggggatatgggggcagatcagagagggaaggactggggatgggctttcggctgcacctggaagaaaaccgtgggctcctctggccaccagggggcagcagattcacacagagtcattcacgagtccttgacacgccgcgtctcctccagcagggggtgctatttactgctccttgtagaaaaagttgggtggaagtaaaatttggcaaattctgggtcttatttcagatacccttgaatgggggggctttccttttaaagaattctcattgcaaatctttttttcttctgttttttgagaccgagtctcactctgttgaccaggctggagtgcagtggcgccatctcagctcactgcaacctctgcctccggggttcaagccgttctcctgtctcagcctaccaagtagctgggactacaggcgcgagccaccacgcctggctaatttttgtatttttagtagagacagggtttcatcaagttggccactgcagtgagccaccgcgcctggccttttttttttttttttccctctttttttttgaggcaaatctttttcttttctcttctttttctttctttctttttttttttttttgtggcaaatctttttaataaaataggatcttttgaaagaacgtgccgggcgcggtggctcacgcctgtaattccagcactttgggaggctgaggtgggtggatcacctgaggtcaggagttcaagaccagcctgactaacatggagaaaccccgtctctactaaaaatacaaaattagccaggcgtggtggcacatgcctgtaaatccagctactcgggaagctgaggcaggagaatcacttgagtcagggaggtggagtttgttgcggtgaaccgagattgtgccattgcactccagcccgggcaacaccagcaaaactccgtctcaaacaaacaaacaaacaaacaaagaaaagaaaaaacacagtggagagcttaagagtatctatttaggcttattttcagcagagatggttccattttacatcccactgcttattaggtatgtggccttgggcgagttttctctctgatcctccgtttcctaatctgtaaactaggggaaacacctaccttgcaggggttccatattccatcggccccaatgacttatttaacattttaaaaactgagctggatataattctaggagttggacccaacagtaaacaaaacaaatgaacattcctggcattatggagccagccttctaatggggaaaacagatgagaaataaaacactcagtcttttggataaagtgcttagaatagggtctgcctggtacatggtaaaccctgaataatgttaacttgaaaagcagaagttgaatcttgttgtatgcaacctgttgaggccaattgggttgcacaaaagattcctgtatcagggagaaattgtaccaacctgggcctaagatagggctggatgtacagtaggtgcttcataaatgctcatgggtacttgaggtggtatctccctgtgtggctgcaggtactgtgtccagttccagttggggtccattccagggagctgcgggcaggcgagggcaccccatgcccagtggacaaggtatctgagtcagggccacacggtctgtgtgaggagtgaatggcctgcccaggacaccaggagccggcgctgctacggggacggtggtggggccaaagggtgagcgacaggactcgggcatgggcaggtgtggctgtagagcccagggcatctctgctgcctgagatagcaccctgggagagagatgctgctccctggccagggcgggggccagcagggtcccaatcccagggtccaaagagaccagccagttaggagccggactcctgccacttccggtggtgtaaacttgggcaaatctcatcacctctcggatcactaagtgcctcatctgaagatacagataatgagaggacttccccatcggtcaggggtgagggctaagtgagattgtgcaaggtgaggacctaggacagtttctgacatccagaaagtatccaagaaaagggagcttgcatggtcattgaaccctcacgagtcccttaaaggccagatttggttactctcattttatagatgggcaaaccaactcagagaggcagtgtgacttagtcaaggtcacacagcagggtttgacccagatttggcttacattatccctctagactgcctcccgtggggtgagggtatcttggaaagcacttcacacatactaattataatactggcttacatcgattgagcgcttcctatgagttgaggattattccaagctctttatattccttcattcattcagtgttgagcatgtgctaggtactgttctgggcactagggattctgcagtgaagaaaacagctgaggtcccttcccttatgcagacagtaaggtcccttcccttatgctgggaggaggcagacatcgggcaaataaatctataatttgtcagatgggagatgaatgttaggagagaaagcagagtaaggatgatgtcctgggggttgttaattttttttttcttttctgggtcttgccctgttgcccaggctgaagtgcagtggtgtaatcccagctcactgcagcctcaacctcctgggctcaggtgatcctctcacctcagcctcccgagtagctgggactacaggatgcaccaccatgcttggctaacttttgtattttttgtagagacggggtttcaccatgttacctaggctggtcttgaacaccttggctcaagcgatctgcccgcctcagcctcccaaagtgctgggattatgggtgtgagccaccgtgcccagccattatttttaaaagcctgatcaaggagggtaacagaaaggaggtgatatttggacggacacccaaaggaaatgagggaggagccatgtggatctctggaggaatagctttccaggcagagggacggcgagtgcaaaggccctgaggtagagcgtgcctgctgcactgaggagcaagagaggccattgggcaggagcagagtgagtgagggagagcgtagaaggaggtgaagtcacactaacacaccgtatgccaatgaaacattgcaagaatctaacatggatacttttaggatctctgctttccagatgagttgactgagatacaaagaggtgcccaaggtcacatacctagcaaatggcagaaatgagatttgaccctgaactgctcagacccccaagccaagctctaaactctagtctagactgtttcttactgaacatgcttttccggtgcagggattatcacactgttggaatatgagctctctctggggtctgtacagggagttctaccatttccaagggtgttaatttccttcttttaaaaattaagcagccctgatcactgtaaacttagaacagggaatgccaaggccagttagggtgttagggagaaacgcatttaggcaggaggcattggattacacagatctgggttcagattccacctctggccctgattggctatgtgactctgggcaaggcctgcacgtgacccggacagtcaccaccacgtacgattgtggggagcacccacaattttgcacagcacctgaccccttgtagatacccactagtgggggctgctgtcattatctctaatctgcagaatagatataataagacgtagtttgtgaaaatgagatgtaatggatgtgatgaacctggcacatagtaggttcccagtaaatacacgtccaacaatattatcacactatagggtggcccttcctgccagcctcccttccaacctccctcccgcttacttgtcctagacctgagattccactgttagagtttcattctttgggataggcgctcactttttagagcttcagtttattcatcaatttttggaaacactttctagtcttaagactctgattaatcccaaatttctctttttggacacaaatactctgggatgtgaaacatggcactttggcaaggctgagatgtgggtcccaggggccacagtacccaccaggaatgggaagggacagaaaggagagccagggctgtgtccgagacaggcatctctccacactccccacctggggccaggctggcagagcaggtgacggaaggtctcatgggggcatgagctcaccaggaaggactggcggagcagggggatccaagagaggagaggcatgagccgtcagccgaattctttccacgggcagctgtgagagcgggcgtgccaagggcatgggcctggagagggattagcctatcagttgggaatttttggagggtttatttagcttaagaagtatccctgagtttgggtcaagcataaggaacatctgccatgagccactcacctactgcgtgctgggcacgcaccaagcaggtgcttcacacgtgtgttcacagttaggccttaggggcacttttagacaagggacatgaactccattttatataatgatgatggcaataataatagtaactttaaaatgttatcatttgtaaaacacttattatctgccacgtactgggcttacaggcttacaacggtgcctggtaccacgtgggaggcgcttaatcagtgtttttttttttttttttctatttttttgatgggggtcttgctctgtcgcccaggctggagtgcagtggcacgatctcgactcactgcaacctccacctcctgggttcaagccatcctcctgcctcagcctcccaagtagctgggactacagtgcatgccaccatgccgggctaatttttgtatttttgtagcaacatggttctgccatgttgcccaggctggtctggaattcctgggctcaagcgatctgcctgccttggcttaaagtgtggggattacaggtgtgagccactgcaccaggcccagtgtttgtcattattgatattattttgcatttttacaaaagatttggattacacctacagaaaattggctttaaaatatatgaacaggttcacaaacatttgggaaggtcacacacctaggtagacactgcccaggcaaggaacagagcctggccagcccccgagacctgcacacgccccctccctcagtccctccctccccataaaggaggcctctgccctgacttctctggtgatccattgtgcgacatccttgccagctttaggaactcgatgtggagccctcaacactatagttccatttcatttcgttttgttttgtttctttccaactttgcatcagtgaaaccacgcaggatgtgctctttggaattcgactgcctttgttccacatgaggtttccaacgttcatccacgtggttgcacttgcagcattagctggttcattcttgttgctgaaatagttagctattactattattattttgagacagagtctggctctgtcgcccaggttggagtgcagtggcacggattcagttcactgcaacctccacctcccagattcaagagattcttatgcctcagcctcctgagtaactgggattacaggcaagtgccactatgcccagctaatttttgtatttttagtagaggtgaggtttcactatgttggccaggatggtcttgaactcctgacctcaagcaatctatctgcctcagcctcccaaagtgctgggattacaggcatgagccaccacgcccagtcagttagctattattatgatcatttttattttctttgcacacagcatctcagatgacctccccaccaacacctcagaggggcaaagattattgatatctccatcttccactgaggagagagaggctcctaggagccaggtcccaaacgccacctgattccagagcctgtgctcttagccactccgtggtgtggcccctcaacagaggaggaaaagggggcacagagcagttaagcaacttgcccagccttgcccagcagggacgtgatcgagccacctccccagaccctcagaactgactctggaatgcccttgtggcctctgagggtcgctggctctgtggccatccccagggtgacttacaagggcccagtgcccatacacttttagggcccacaaagacattttaattttaatttcttttaaaaccagaagaaaaaaactgatgctataataataataataataataataataataataataataatattagtggatcacaaatccagcctggattttacttgtctttatacagtgcagtcacaagctagagggagggtccctgaaagcaaacatccctggagcccaggaaagccatcattcgactgagccagccccatctcttgcaggaacaagatgtggctgtggcaagcggccagccatccccggtgccgagggacctgggagaagctagggcagctccggcattgttcctgccctgtggtccacagcctcgtcttcatctagcgtctgcaccccctaaccgtctttccaaagcctcggggatggcagggaaactgcagggcttgggatcccgcagaaccaaagagttgggagaaatctgcaattttgagactgaaggaacaagccttgtcgttatgttgacactgaaaatagctttatgcttccactcagtgccagctgagtcacggtcctactgacatctcctgcccattcagggcttcccacatttcatctcccagacacactctcctggcccttgccctattctccttattgtatacttaattttttaatgaactctctcccttcccttccctttccttccctctctctctctctttctttcttttctcttttttggatggagtttcactcttgtcacccaggttggagtacagtggggtgatcttagctcactgcaacttccacctcccagggttcaagcgattctcctgcctcagcctcctgagtagctgggattacaggcgtgcaccaccatgcctggctaatttttgtatttttagtagagatggggtttcaccatttgaccaggctggtcttgaactcctgacctcaggtgatgtgcctaactcgacctcccaaagtgctgggattaccggcatgagccaccgtgcgcagcccctccttccctcccttgtctccctcccccacttccctctcccccccttctctctcccccttcccccccttccctctccccctcccccctccctccctccctccctcccttcctcccttccttccttccttccttccttccttccttccttccttccttccctctttcttgacagaatctccctctgtcacccaggctggagtgcagtggcacaatctctgcttgctacaacctcggcctcccaggttcaagcgattctgtcacttcagcctccctagtagctgggactacaggtgcacaccaccatgcccagctaatttttgtatttttagtagaaatggagtttcaccatgttggctaggctggtctcgaactcctgacctcaagtgatccacccatctcggcctcccaaagtactgggatgacaggtgtgagtcaccatgcccagccttcttttctttactcaaataaatttatttgaaaagaaaactacttaaatatatgtttaaagaggaaacattttatcacaattataaaataaaataaacaataatagcaaacatttattaagcacccgtaagagtgccaagcactgtctcagccttttatacatactcactcattggattctgagttagatgcaatgattatccccattttacatgtgagaaaactgaggttcagagaggtttggccactttgctggaagttgcagttagtgagtggcagagtggggattcgaactcaggagctgcacctactgcttaggttccctgcacagtatatcagcctcatgagggcaggggttttggtttctgtgtccctgggcctaaaatagtgcctgacacacaataatgctcaataaatacttgttgataaaaacaaatgaataaatgaatgatcagttgctatactaagaagacaatcaggctgggcatggtggctcacgcctatgatcccagcactttgggaggccgaggcgggtggatcacctgaggtcaggagtttgagaccagcctggctaacatggtgaaactccatctctactaaaaatacaaaaatgagccaggcatggtcgtgggcacctgtaatctcagctacttgggaggctgaggcagagaattgcttgaaacccgggagatggagttgcagtgagccgagatggcaccaccactgcgctccagcctgggtgacagcatgagactctgtctcaaaaaaaaaaaaaaaaaaaaaaaagacaatcagaaaaataaatacaatggaaaccagagaagtccactgttgcctgctcaagatgctgagcatgaagcctgttctcctgattcagacaagaaaccagccagtgtggagtgataggaagaacacactcatagccaatggagacttgctccttgacaaattagaaaaattatactggaatcttggcactttgggaggcctaggtgggaggattgcttaagcccaggagtttgagaccagcctgggcaaaatggcaaaaccccatctctaaaaaaaaaaaaaaagatacaaaaattagctgggtgtggtagtgggtgcctgtagtctcagctactcagggggttgaggtgggaggatcacctgagcctgcgaggcagaggttgcagtgagccgagatcgggccactgcactccagcctgagcaacagagggaaaccctgtctcaaaataaattaaaaaaaaaaaaaaggcttaaaaggaggctaatttttttcctttaggagtcagttgttataaacatttttaacagtgaattcacataccatgccattcacccatttaaagtgtacagttcaattcttttcagtatatagaaaaaattgtacaaccatcaccacagtccaatttagagcatttttatcctcctctgaaagaaaccctgtactcgttagcagcctctccttcctccgacccctctagccctcagcaatcactaatctttttctgtctttatggatttgcctattccggacatttcatataaatggaatcacacaatatgtggtctttcgtgactagctgctttcacttggcagaatgttttcaaggttctcccatcttgtagcctggatcagtactggagtcagttatttaatgctacatcctgggttcgggtaaaacgacctaaaatgtgagtcccccgcttcaggaagcgccgctgtaatgaataaagaaccttttgggggaatcatagctcaatctcttcctggttctaagcgggcaggttcaggcttccctgcggtggggttggagcaggaggtttatctttcagctgtccttgggactgggcaggaacttgttcaaatgttactgctactctatcctccttcctaaatcaggactctggacgctcctgggaatcactgtctgttgctgctctctgggagtgtgaatgaatcactgggtgagaatgtcagtagcacctgtgtgtgctggtctggggcgagaatcctgggccaaggggcagcggaggggagaaagaagcagatggccacgaggccagcaaggggctgtccgactcgtaccccacagccagcattccctgcctctacccgtacacttgttttggctgcaggaagctgttttaggtggaaatcatttgatgtgtgtaggtgctgtcttcccaaacacaccgtgctcgacaattgccccagctctgcaggatagactttttgtagctcttggtagctacccattttttcagcctctaaatagtggtggtgcctgttttaatcctctcatggatcgtgtaaagtaggtgatcttttccccattcacagatgggaaactgagcttcaggatagtcacatgacttgtccaagttctcatgattaggaaacgttggagctgggctttgaactggactgcaaagcttgtgctcttgacgaaataggaaggcagaggctgtggtggggagcagcttggttatgggtacccagaaggcagagccgtttcttgcgtaccataaaatgggacatttaccttgggtactccctttggagtgtgttgctggaacttgtgcagggacttagggaatcttctggggaagaggccagcaatgtgttggggatggagacgaggagcactcagtgttatgttttggagccttgtcctacacctgaggacctccaagtctatcagtcaaggccctttgggaaatgagtgaaagaactcaaccagctcgagcaaggataatttattgactcatgtaaagaaaatatccaggataagactgccttcaggtatggctggatccaggggtttaaaggttgaagccactgcctcactttcttttggccttgctctcctctctgttgactttgtgcttaggtaggcatcctgtggtggcactaatggctgccagcagctctaggctttcttcctccccattctgcatcacaaagctgaagacagcatctcacttccaatggtctcagtctcagctacaggtctggggttgctgcttattgaccaggctcatctcacacccctggttcatattcctgaatcaatgggtggggggagggtgggggaatgcactgttttgattggccggtgctgggtcaggtgcatatccttggaagtggaggcatggtcagtcctacttgaaccacgtgaaccaagaaggaaaactcgggacccttgtatcagaagcaatgggaatggatgctgggaatgtttcaggccacagacatcctcctcgtgggtggcagagaagccaccattcatctctgtggctttgctgccaacttgccatgggaccttgagcaagccacttcccttctctgagcctcagtttcctcatctgaacagcgatgatctttaagggcccatacagccctgaacttttgaggccaacagggtttgtctagccaacagcctggcatcctagcttgacaggtccaagctaaggcttaggaatgcatggccttcagaaaccctggggtcgaacctggggctgggcgcctggcctcttgttcttgcccatcctggcagggtacagcctgtgatgtgggagggaagggttctgaggaggtttctttgcacatccccagcattctccgtctataattggctccaaatgaaatgatctcatccctgaacactgaggaagaaagggtgggggtgaagctgctcgctggcagcatctgacatagtttatgactaacccgcttccctcccgaggcagggagagacggtccgctctctcgaagacaatgtacaattttgaaaaaaaaaataaaaaagtcttggtaaatagattgaggaggctccagcctcctgggcttttgggaggcccaaggcatttttcccctctgcccaaaccaggtatcttttgcccattgctcacaagtcaacgtgacccgtgctattaccattccccaaacttttcacgtcaaaccctggccgggaaggtggtcaatgtagccagtccatcaagcgatttgtcccatatggattctcaattgagttttgtggccggctggagcttgtttaaatgcccatacattaattttgaaagatgagctcctaatcaacttttaaaaagcttgtcacagcaccatctgtttggcgtttgtcactattgcattacataagaggaaagacatttttaaagaatgcggctacatttagtaattggatcgccggagagaagccaaaccggggcggatggcaccgtgattcagaaatgccacgggcccttctccggggtgtggcggcctccccaaattccacgcggtcttggcagagacctgagtgcagcccagcttgggagacaggcttggggtggcttcttttcctcttgccttggtcttcctcttattttttccatttgttctccctcaccccttgctaccccagtattagcagtgaccaagtggctttacttccctgagtcccaatttcctcatctggaaaatgggattcacaagagcaccatcttgtgaggtttaaatgcattaatgcctacggtgcctggcacgtggtgagtgctttataaagtgttgctattttataaagctatgtctgatgcatagtaggtgccaacacatgttcattttccttcctttttcccttccctttatttatttatttatttagagacagggtcttgctctgttgcctaggctggagcacagtggtgcaatctcagctcactgcggccttcacctcccaggttcaagcaattctcccacttcagctccctgagtagctggaactacaggcatgcaccaccacacctgactaattttttgtattttttttggtagagacggggtttcaccatgttggccaggctggtctggaactcctgacctcaagtgatccatcagccttggcttcccaaagtgctgggattacaggcgtgggccaccgtgcccggccccttccttccatttaattcaacaagttcttaggaagtgcccacgtttgaggcagagctggcatcatgcacatgcacagccatttgcacagggccccacactcacaagaatgctgagcttggtttagcgttctgctgtcgctggcttgacattcttaatttttgaacaaggggccctgcattttcattttgtactggaccccacaaattatgcagctggtctcatctggaggtctagaatgatgctatgtcttatttgaccgtctgatatttaaaataacaatagagtcaacgttttaaaatcaggagagttcacacaacagtctggcttattttagaaaattagaacatcttgccactgtgagtctgcattcccacacactgccacatgggctggagctggagtcctctatacaggccacatccgccactgtccccaccactcctggaggctttggactgagtctctttgctcatttatagagcttccagcatggtagctgggatcatgggctttgcagccaggtatgtgttcagcttttctgttaatcatcacagtaacctctctcttagggtagtaaggattaaactagttaatataggcaaagcatctggaatatgttgcactgttattgctactgttctgctttatcctggtgcagaagctcagacccccagtctgagggctgcccctccgggagctggaagctgcgcctgtggcagctggctatgaaagcgtctctttctgctgtcccacacagcagccgttgtcaatgtccactttctctccctccacctgcagcaccagagttcacaccttgggcccgccctcctagcattattttgagaaaagggccttctgtcctgtaaataggctgagtcatccctgcctcagggcctttgcacacgctgcacttgcttcctagaatacttcttttcccatcgctttgcttggccatcttctccttttggtctagctcaaatggtacttcctcagggaggcttttcctgatcgcctaagaaaagtagccctgttttctttcccctgtcatacacattcgcctatattattttcttcccagaactggtttgttgtgtatctcccagaggaccaggtctgccttggtcactgtgatatccctagcacttaggccattgcctggcacatggtagatgtttgataattatttattgaatgaatgaaggaaggaagaaaagaattcatcaactcctcatgaccaccctgtaaagcagggacaagagacctgagtcatggagaagagaagggactcctcaaggtcgcacagcccagaaggggcagaaagggtgatgaggacctaggttttctgcttctacaccccctgtcccctcaaccccccaggtgggaagcagcagagacatttggatctttggctcgaccagccaccaagaacgggtcaagtgtgcagcaaggcccagagcacagcgtctgagggtggtgagagcgattcacccaggcagccaggaggcgagactgtttacaggggctagcggctgtcgccatgacaaccggacagcctacagcttcctgcgtcaccagggacgcaggtttgctcttggctgggaagcagtggggacaatggagtgggggctgggaaatggggggaccctaaacactcagtcttggggggaggcagttctcatttctggttttttttttttttttgagatggagtctcgctctgtcgcccaagctggagtgcagtggtgcgatctcgactcactgcaacctctgcctcccgggttcaagtgattctcctgcctcagcctcctgagtagctgggattacaggcgtgtgctaccatgcccggctaatttttgtagttgtagtagagatggggtttcaccatgttgcccaggctggtctggaactcttgacctcaagtgatctgactaactcagcctcccaaagtgctgggattacaggtattagccaccatgcccggctgggagttctcatttctgagagttgcttgaaggctgggagggcctggtgatgctacctaagtgtgtgtgtgtgtgtgtgtgtgtgtgtgtgtgtgtgtgtgtgtgtagtgtctgggctgtgtggagccaagctgcctgggtctgaatctcagctttgcctcttctgtgccgtggcattttgggcaagtgagttaatctctcggtgccttagttccctctaatgtaaaataaggtggacagtagtacctcataggactgttatgaggattaaatgagataatagtctcacggcacttacaatgcaccttgcattgtgccttaattcttgacatcaatctacatctgactctaggttgtcttcttgctggggtagtgggaaatttggtctcaatcatcctcagggatccctacttccctggcttttgtcattcattcaacaaatacttattgagcacctactgcatgccacgtattgttctagaggctgagaccacagcagtgaacaaagcaaacaaaaatccctggcagagtagagctaacattctagtagggatagatagacattaaatatgacaaaaaggaaaatagatattatatcagatgacaataagaagaaaaagaaagcagggctggaggattccaactgcaggggagctgttgcaattttagaaaaattgatgcatggggatgtgagtgtgtcagggaaggcctcactgagagagtaacctttgagtacaacttgaagaaggtaaaagagggagtcacaggttatttgcaagagcattccaggcagagggaacagtaagcgcaaaggccctgaggcaggagcatgagcatgtatgtgactgtatcatgtagtcatatctcttggcaagtctgtgtgtgtgatgttatgtggcacacattggtggcatataggtggttatgcctgtccacatgggtggcaatgcacatacatgtttgttcatgtacagagctgctgtgttcagtcacagaggctgtgcctgaacaattcagggagtgacattcacactgattgccatgaaatgggaccccctggtgtagtgcagcgcagtggccccgagcatatatataaggaaatcaatgtaaaatgtctgtgaaaatgttcacacgtgtatgtgtccggatatttaaatataacgatatgcaaatatgtatatatgaatgtctttaagatgttgatatttcattcctcatggacttttgcttcagtattgatttttaaaaaatattgcattaagatattatttctcttgattactcagtttttgggtgcatcttacatttgcatcagaggcaagtgcctcactctcttaatgctggtcctcgccctgccttggagttgggcaatgaatgtgcgggaggcagggatgaggcaagggaagcctctccttctggctccttccagcatctgggctcatcagcacatgactagaatccaaacctaatctgaacacattttgttcctttaaaacaagatttattgagtgctgactgtgcgccagggactctgcatacattattttattttatccttaccaccatctctgggggtagatatttgctcattccattgaacagacatttgcttagggcctactatgtgccaagagtataagctggcatttgtgctggtctggcagccactcctgatttttctggtaaaagcaccccagttttcctttagggaacctagcctcttccctttactgtccaagtggtttcacctgggctttctgtacccctccctcagactccaggggtgggggtgtgatccaggcgacccaatcagcatactccatcccttttgctccagagattagttataggacgagtatctaacccaagttggttcaatcagagtgaatcctgggatttttgctgccctgttgggaaaaagagctctcttttcatcaggatttctagctgtgagaattctgtaaccctggaattcccagtgagagtctactacatggagagagagagagagaggaaaaactcatcccttatgacatctttaaagcccctggatccagccacacctgaagtcagttaccctaagatttttcaattctgtgagtttatacttgtttttctttttaaaagccagtttgagagggaagctgaaatcctgtgcttggcatctttgtacattatctcctttaattcagagatgaatcccatggggaaggggctctgattgtacaagaactgatcctcagggagggaggtgacttatccaaggtcacagcaggttggtagttggagcttgaattcaagcccaggtctctactcctgagccgttctgccattccacatggtctgacctctggacaagagggtttgtgtgagtattagtgacatagacccgagtcctgttatggccactgttttgctctgtgaccttgatcaagtcatttctctaatatgagcctcagtttcccatctggaaaaatggtagtgcttaccccatcatgctgtcgtgagatgatccatgaaagtaaagtactcagaacagggctagacatgcagcaatgaacataaactattattaccatggctctctttttttttttttagaaaatttttttttaaatttcataggtttttggggagtaggtggtatttggttacatctttagtggtgatttgtgaaatgttggtgcacccatcacccgagtggtatacacttcaccagagcagtatacactgaacccaatttatagctttccatccctcacccacttcccaccttgccccgcaagttcccaaagttcattgtatcattcttatgcctttgcatcctcatagcttagctcccacttatgagtgagaacataatgttggttttccattcctaccatggctccctctttgagggaagaaaggggacccagggggctccccggccaccctgctcccatcctccctgatggccacaggctcccagcagcccttgatggcaccttcatccatcttctgccagacacacagaactggctcgcttacccgggaagcaggcacttaaggaggcgcttccccgctttctcttttaattttcgttacataaatttcacatttcctggaatagagagcttgaatgtctggactcatttggaaatcgagtcagcaaagggcctcatttatattaatggggactcgagcctgacttgagacgtggcagagacaaggatggatggcagcagctcctaggcccagccatccaggctgagctcagacactgccttgagaagcagatgcctccagatttaggctgggactgttctcgttgtgtggggagctcctggatgcaagggcggtgttgtcacccctcccccactgaaacttcccaatggctgctcactctctcagagggaactccagtctgcttatcctgcttgacaaggggctgcgtgatggacccctgctaacctccctgctcctgcccaccactctcctccctcatccttcttcagtctggctggcctcctgagagcattcctgcctcagggcctttgcacttgccgtgctctctgcctgaaaggttgttctcctagctcatcccgtggctagctccttccatggcttgtctcacagacagcacctcagggaggccttccttgattgcccatctggagaaacactctccagttactctgtatcacacccatttcattttctccatcacactgagcaatagtttgtattttcttgtttacttatttgcctatttatttattggctgtctttcccatgagagtataaaccccattagagcacagactacgtgtctccttcagctttgtccccctaggatctggctcagagagacagatttcttaagcaccttaataaatatttgtggaatgaatgcctgcactcattcagcaaaccctttctgagtgccttcctggtgccaggctctattctgggtgctgggaacacagctaagaaaaagacaagaggcagggcacggtggctcacgcctgtaatcgcagcaatttgggaggccaaggcgggtggatcacttgaggtcaggagtttgagaccagcctggccaacatggtgaaaccctgtctctactaaggatggaaaaattagccaggtgtggtggcatgtgcctgtaatcccagctactgaggaggctgaggcacaagaattgcttgaacctgggaggtgaaggttacagtgagccgagatcgtgccactgcactccagcctaggcaacacagtgagactctgtctcaattaaaaaaaaaacaaaaacaagacaagattgttggctgcatggaactcgtggtctggcgcagagaggaaaacaccatagtaacgaacatttattgagtgtgacaaggattttacaaagagacatcacatttaatcctaactacagcccttggaactattatttgtaccagttcatgaggcacagagaggtgaaatagcttgctcaaggccatacagttagaaaacagaggagccaagattgtggccaggccatccggctccccactctgctggtttaacaagctcactgaagccactgggagttaaagccttgtgctgtgaaacctgtgatgggggaggctctgaaggctgtgggagcccagaaaaagcacctgacctattaggctggtgcaaaagtaattgtggttcttgccattgaaagtgatggcaagaactgcaattgcttttcacaacctaatagcttttgataggagaaaagatgagcaaagcctcctgaaagatgcagtaccttagttgtgtctagaatgtatttatttttaactttacattatagcttaagaacttttaatatctccatgctgtccacagttaaaattttaagtaatgcatattattccagtgagaggcagcaccatccatcactgttggggagtttcatgcttgcaattttgaggttctctttaatgctttgaggaccaacaccctggacttactggagtaatgtagcgctcaggtttcggctcctccctttacttggctctgaggattctacatgcctggaacaaggcacatctccaaagtcactaacgtggctagataatggataactagaagtgcctgccccctccaccatccttgtcttgatgccaggtgagatccaggctcctctgccccaagaagggctgagcttacattatctccagctcagcaggtccttggaaattaggttgttttaaggaaataaagaaatgtgatatttcaacaagacactaggaacagcggttgcctctgcagagggaaactgggtggccaaaggatggggtaagagggaaattttcgggccaggcgctgtggctcacacctgtaatcccagcactttgggaggctgaggcgagtggatcccttgaactgagtccaggaattcgagaccagcctggacaacatggccaaaccctgtctctacaaaaaagcccttcaaaattagctgggtctggtggtgcatgcctgtagtcccagctacctaggaggctgagcttggaggatcacctaagcctgagaatttgaggctccaatgagctgtagttgcaccactgcactccagcctgggtgacagagaccctgtctcaaagaaaaaaaaaaaaaggagattttctttgcagatccttttatatctttcccattgggcaccacgtgaaattattaccgagtttaaaaaaaacttttttttaaaaaatgtagaagttaatgtattatttctgcatatcggtctgtggactaagctttatacgatgcattcattctctttatttacctcaaatgtgggaagtagctattattgcctcttcctgacaacaacaaaaaaagcctgaggactggagatgggctgtgccttgcccaaggtcacatggtgaattagtgccagaactgagactccactgggtgcagtggcccacgcctataatctcagtactttgagaggctgaggcaggtagatcgcttgagcccaggagtttgagaccagcctgggcaacatggtgagaccctgtttctactaaaataaaaaatacaacagttagctaggcatggtggtgtgcaatgtagtcccagctacttgggaagctgaggcaggagaatcacatgaacctgggtgatggaggttgcagtgagccgagatcgagccactgcactccagcctgggtgacacagcgagactctatcacaaacaaacaaacaaacaaacaaagaattgagactctactccaggccttctaacctgtccagggggtctccacttctccaggtacctcttcctttactggcggaagccatgccgaggtgtggacagaggggtggtgatacctctgtagttatcacctacagtagggtggtcacacgtcacactggtgttacacaatctgggctcaaatcctggggctgtccctggcctgctgcatgaccttaggtaaatcacaaaacctcttgggccttggctctgtgatagctgggctccaagatggctccaatgactctcaccttccagcgctcactcttttgtgtggccctctttggcagtgaatagggctgacctgtgggaccaacagggtattttggaagtgacagtgtgtgtgacttccacagctagataataaaggatattctaacaatggaatattattcagctcctgggctcaagctatcctcccacctcagccttccaagtagctgggactccgggcgtgtaccaccatgcctgtctagttttatttttatttttgtagagacagggtctcactatgttgcccaggttggtctcaaactcctggcctcaagtgatcctcctgcctcagcctcccaaagtgctgggattacaggcatgagccactgtgcctggcgccggctgatgtctgtcttgactgcaacttcacaagagagtctgtacaggaaccgtccagctaagccactctcaaatacctgagccacagaaactgtgtgaaatgtaagtgacgattgttgttttaagctgctaagtgttgggataatttgttacacagcaataggtaatgaatacagtttttcatctgtaaactaaatattgtggtaatttcacagtgtcattgatgataataatttcatgatgactcctttgatgatgacttcataggttgtatttcatacggttgttgctaagaaattagcaaatgctaattagtgcttggagcagtgtctggcacccagtagattctgagtaaatgttaactggtttgattatatgttctttgttatttctggcactgtgagatgctgagcctgaacaatagattccccgccccccttttttttctgagacagagtcttgctcttgtcacccaggctggagtgcaatggcacaaactcggctcactgcaacctccgcctcccgggttcaagtgattctcctgcctcagcctcccaagtagctgggattacatgcatgtgccaccatgcctggctaatttttgtattattagtagagacgggtttcaccatgttggccagtctggtctcgaactcctgacctcaggtgatccacccacctcggcctcccaaagtgctgggattacaggtgtgagccacagcacctggcatagatacccattaaggaacatagctaggccccaggctgcagtgggataatagagatggttaggatgagagctaccgctattgaacactcactcaatgcctgttcataagcacttcatatccttccatcgaagcctcagcagcagccctttgaggtagatgctattatttccccatttgacagactagaaaatcaaggtgcagagagagacaatgactggccctaaatcacacaccgaagaagtggggtagccaggatctgaactcagatgtttcagaccccaaagtttctattctgaaccactaggctgagctgcagcttggctccccatcccccacgcccacccctgacacaaagcttatcttttccctttaccaatttcctgcttattagtacagagttaattgcccacacatctgagtgcaatcattagttcattcacctcctatctgcagaatgtcaaactcctttgcactcgggagactggagagtagattcctttagaagtttgttcttgtgattcacgttccctctcccaggctatccccttcaatagctaggattgggaataagaatgcacacatgtacagaaaagcacagaaacatctgccctgccttagttccctacagggtctcatcagaggtggtttcattagccccaaccctttgcagcctggcaccttcagacatgccaccagctggctctcctaatatttgctgtggggccatgtgatcatcaggagggataggtcctcaaacaggcgatgagctcaggacatgggcattgccacacctgttcctctccccaaggaggggggaaagctgtgcagtcacagacaacgtggccttttataagcttgaatgtgatgtgcatacttgtgcatgggcaggagagcagacagggaccaagccaaggctgacagggatcagagggaaggacaggggtgtttgcgggtgcctgcaatgtggcagtggctgagctgggcctgtgtgcctgtacaccattgtgtttcagatatttttgactgtcaagttgcaggaagaagtatattttgcagcatgacctgtaacacacacacatgcacacacaattgacatgaaagtttcatgaatctgtacttaccttttatgagcaatgcatgctgactttgattcgattctagtttattctactccagtctattttattctttcattacaaaattgctagtcatgacccatgaaatatgtcaaaacccccaaatgcaggagttcataatctgggtctacaaacttgtatagaacaaaacgatataattttattttcactgacctctagttgaaatacagcacttcctttaggtatgaatataggcaacaaatcatagtaatatgtttcatagtaattatgtttcacacacacaaaaatcacaggctgggagtggtggcatgcacctgcagtcccagctactcaggaggctgaggtgggaggatcgtttgagcccaggagttcaaggctgcagtgaactatgatcacgccattgcacttcagctggagcgacagagtaagatcttgtctctagaagaaaaatcacagattgttttgtatctcgttatgtttgttgcagatgtctcaaaataacatttatgatcttcactacctcaaaattgtggtcgttactaattgctggaactttttatttatttgagacagggtctcgctgtgtcatccaggctggagttcagtggctcagtcatagctcattggagccttgaattcctggcctcaagtgatcctcctgcctcagcctcccaaagtgctaggattacaggtgtgagcaccaggcctggcccgatcttgttatttaatttgttaataaagaagcacttgtattactacatcacacatctaaaatattttgaaaattgcatttcagtaggtttcctttgtaaacctatgtatttggctaagtgcagtggctcacacccataatcccagcacttgggaggccgaggcaggaaaattgcttgaggccaggagttcggagagcagcttgggcaacatagtgagaccctgtttctacaaaattgataagagaccccgtcttttaaaaaataactgggtgtggtggcaagcccctgtagtccctgctacctgggaggctgaggtgggaggatcacttgaccagaaagactgagactgcagtgagccgtgatcatgccactgcattcctgcctaggtgacagagtgagaccctgtctctttaaaaaaaaaaaaagaaaaaaaaaggagcgtgaggaaaaaaaacccttatgtattggcatttaaatattattctgagtctgagaagggggtctgtgggtttcactggatttgtgagagggtccatggcacacagagtttgagagctgctgccccagtgagtcctgatacacagttcatgaaacgctaccccatgctgaaagctcttggggggcagagctccggagtcttgaacctcgagcccagcatggaaatcacatcggtggccaatgtttccatagcacatatggtgccagcctctgtacgaggcccttcacatggattatttcttttaatctttacaccaactcttgtgtgaggggtactattcttagccccatgtctctgtctctttaccctacttcatttttcttcttagcaccagaagtgtcatatatttttatctgtttattggcagcctcccccactgggatgtgtgtctcttgaaggcaggaatttgctttgctgagtgcttcatctccaaaatatcaaaatatgcaagacttaagggggtaccaaaaactcaggaatcatgccatgtcacatatcatgttcacacacacacccacaacctcagaaatcgaaataaggaacattttactgcctttttttttctgggacagggtctcgatctgtcacccatgctgaagtgcagtggtgtgatcatggctcactgcagccttgaactcctaggctcaaaagatcctcttgcctcagcctcccaagtagctgagactacaggcacacgccaccacacctggctaatttttttttttgagacaacagtctcactctttcaccaggctggagtacagtggcgcgatctcagctcactgcaacctctgcctcctgggttcaagcgattctcctgcctcagcctcccgagtagctgggactacaggcgtgcaccactacgtccagctaatttttgtgtttttagtagagatggggtttcaccatgttggtcaggatggccgcaatctcttgacctcgtgatctgcccacctcggcctcccaaagtgctggaattacaggcgtgagacactgcgcccagcctaatttttgtatttcttatagagatgggatttcaccacgttgcccaggctggtcttggcaactcctgggctcaagtgatccccttgctttggcctccaaagtgttgggattataggcatgagccactgtaccctgtctgtaatatttaaaaaaataaaaaataatgccccaaacccataaacaaaatatcaacatttcaagtaaagataggatccaacctcctgcatgtgtacattactgcctggatctccttatcctgttactggtcctgaggggcttaaaacctaacggttgctaaagtgaattagtctcattttgcagatggggacattgaagcaaggatgctaaagaccccctcggtgccaatagccagtaagtggagcagttaggattttgaactcaggcaattgagttccagccccatctttcttaaaccctgcacagccagcctcatgaattatcatgcttgatctttttggtagaggcagtaaactggtaaaatcagataggtttgagttaaaaccccagttttggctgggtgcagtggctcacgcctgtaatcccagcactttgggaggccaaggtgggcagatcacttgaggtcaggagtttgagattagcctggccaacatggcgaaatcccatctctactaaaagtacaaaaattagctgggcatgatggcgcatgcctgtaatcccagctactgaggcaggagaattgcttgaatccgggaggcggagattgcagtgagccgagatcacaccactgcactccagcttgggcaacagagcgggactctgtctcaaaaaaaaaaaaaaaaaaaaattcaattttgccccttcctagctgggtgatcttgggccagtcatctcaatgctctgtacacagattaaagagggcagaggggactggaaggggatcagaatgtggctacttcattaggtgggtccactgtgggtgtgtctgagaaagagtggggagaccgggatgttagagcaggcacccttgggtgagagctgtgggagatgaaatagagaagcatgcaggagccagtggatgtaagtatttgcagaccaagccagggactttggactttatttaacacgtaacagaaagcctttggaaggttttgatggcaaagtgacatgatcagactgacagcttgacaggacccctctggccattatgttgagaagaacctgaaagatcaagggcagaaatagggaagctggtctggacgtggtacaatatgaaggcaataaacaatggtggcctggccccaagctgcagcagtggaggagcaagaaatgcagatcccagatctattttgaaggcagagcccagaggaacggctgacaagccattcatttcagcactgtttgttatagcaaaagttgaaagcaacttgaacgttcaggagtaggagactggcaattaccatgtataatagaacacaacataggcttatgaaagaatgaggaggctcttcgtgtattaatacagaatgatttccaagatacattaaatgaaaaaagcaagatgcagagcagtgtatatggcactcttactatttgtatggggtaaaatcaaagcaaaacaaaacaacacacgcacgctacacatcggttatatgtatgtgtgtgtgtgtgtgtgtgtgtgtgtgtgtgtgtgtgtgtttgcaaaaatgatctctggaaggatacgtgagaaactggcggcctctagggacagggggacaggggtccaggggtataagggaaatttcacttttcattgcatcttttggatttgagattttgtgcctcttctcaactggaggtgatgtcccccaggggacatctagcaatttctggagacatttttggttgttgcaactggggggaggtattactggcatctggtgagtagaggtcagagatgttgctaaacaccctgcagtgcccagggcagaccccacaacagagcaagagctggccctaaatgtcagtagtgctgaatttgagaaggtttgatctattaaaaaacataataaggctgggtgtgttggctcatgcctgtaatcccagcactttgggagagcaaggcgggtggatcacctgaggccgggagtttgagaccagcctggccaacatggtgaaaccccctctctaccaaaaatacaaaaattagccaggtgtggtggcgggtgcttgtaatcccagctacaggaggcaggagaattgcttgaacctgggagacagagattgcagtgagccgagaccgtgccactgcactccagcctgggcgacagagcaaaactcagtctcaagaaagaaagaagaaagaaagaaagagagagagagagcaagagagagagagagagaaagagagagagagagaaagagagaaagaaagaaagaatagaagttttttttttttcaggatggtctttattctgaggttgtatattttatgggtttgatatatcctttgttttactaagataatatatagtacatgatagtcattttttccacatctttacttggcaaaataaaatgtcagcaagccttatacacttctctaagctgaataaaaaattatccgggcatggtggtaggtacttgtagtcccagctacttggaaggctgaggcaaaagggtggcttgtgtccaggatttcgaggctgcagtgagctaagactgcaccactgttccccagcctgggtgtcagagtgagaccacatctctagacaaataagaataaattttttttttttactgggctatgaaatcctaaagtctggaaactacccttttcactcaatgggcttttgaaaggtaatgattttaaaatatgtccacaaaatatttgatcctttttccccaagaggtagaattacctctctctaagtgtgaaccagatttggtgactcactgctaacaaatagaatttggtgcgagtgatggtttctgatttctgagactaggccacaagacgcattgtgcctttctccttacccctctctcttggaccactgcccctgggggatgccagcttccatgctgtgaggatattcaagagccctatggagaagtccacatggtgagcaactgaggcctcctgccaacagccagtaaggaactgaggcctcctcagccaacttagaggcaggtcttccatcccagtcaagcagaggactgcagctggtgtcttgattgcaaccttgtgagagacccctagccagaaccactcagctaaagatgctcctgaattcctgacccacaaaaaccatgagataataaatggttcaacttgctagagtttggggggtaatttgttacacagcagtagataaatacagaaggctgggcacagtggctcatgcctgtaatctctgtactttgagaggctgaggtgggtgtatcacttgaggccaggagttcaagaccagcctggccaacatggcaaaaccctgtctctattaaaaaatacaaaaaattagccaggtgtggtggcacatgcctgtaatcctagctactctggaggctgagtcacgagaattgcttgaactcggcaggtggaggctgcagcgagcagagattgtgccactgcactccatcctgggcaacagagtgagactatgtttcaaaaacaacaacaaaaaacctcccaaaaacaaatatagaaatctttgagccctatcagtaaggcagagatcacagaaaggtagcctatgggctctggtctgcctacagatatatttcctttggccagtacaggactacaaaaaatggaattaatcactaatgtttatttatttttattttttatttattttatcttttagcagagacaggatttcatcatgctggccaggttggtctcgaactccgccttggcctcccaaagtcctgggatttcagttgtgagccacatgcccagccatagttgctaacatttaaaagttgggtatttcctttaaaaatccagatttctgacttctcttagaaagatctaatattgctgggcccacatccctatggggtaacaaccagctggagatgaatggtgttcacccctttagacagggtgtgtgttctgttttttatcacactcaccaccacccccttaagtctcttagttaagttgctttactcatttatgttacctgctctgccccagtagtcatttgagcttatgccttctattgtgagacagtttttaatgagatgcccaggcatagttgacatgagaactaaatgaccagagttggaactttgattcatgaatatcatgtaggatgggttaccactgggttgcatagtgggggtgaaaagccagttatattttcatgtcctccctcttctggggggaagagagaaagctgatgccgcctggagacaggattcctgattcaagtccccttacagcgcttcccatctcgcctccctgtgccctccaaaaaataaactcctccaggcttgttttttccataccttttattgaactctgcagacttcattaagggaccatttgcttagaaattcttaaacatttggacatattttacaagacaagacagcagctggaggtcacacaaagatcacaatttcatctcaccacatgcataaaaagacactgggatttgtgtgtgtgtgtgtgtgtgtgtgtgtgcgtgtgtgttgcgcacatgcgcaatgcttattttcacctttacaggaaggactagagacattaactgacgagagatgaataggacccacgaatgcacccccgagaaaagagtggctgaggacattggtcatttatggctaatgtgattggcttggcccctgtcaagggtgaggtgatcagaatggctttactggcagaaaagccccaacctcacacgacgggttcctgggagagacagggtcttagctgatgggatctgggggcatactatcatgacggctttggggctcagaaaaaaagatcttcggctctaaaagctggagggcaggctggccttaatatccagctggactcccatggctcagggaatgcaatccagtttccagatgttggctcctatgtttctgccccaggaagtcccagaccaaaggaagtcccaacttcgaacccttggcttagtccattggaaaaccacttggtggtcccccccatgggtcgtgtgtgagctaaaatagaacatgaggctgagaaatgcagggtaggggaagaggaaggagggcagagctgctctgtgggcccccaggaagtgtggctctgagagggctgtggcccttatcagcttggggcctacaagcatcaaattgagatgtcatcttgagtcaaagaaagatgaccttgatggggcagttatgggtttcagtgggagaggggctcctcatttttcttctcttcacagttaggtagggattcattaactcccccattcactcacacattcacgcatccagtcatccactcagaggccaaccagtcacacattcactcactcacaaaaacacaggttggatgaccatcatgtgccagcggcataggttggggataaccctgagttcctggtgcagaaaataagattctcagtttttgaccttggattgagaaggacctatgaaatcaagatagacctggagaatcctccctgtccccacccactcaggcacactcagctcaaccaagagggaggcccaaaccccagtgaagcccaaggggcagagccaagctgtggatatgtcagagtttcttgggcatcttctctgctgcctgcctctttccaatcttggttcagatcagggaagcaggaagtatgggaagatccctgcatggccccttgagggcatcctaatgggacggaattgggagtttcttatattttcatgaaatatcctatttttgtctccttgtgttgttgcaacttgagtgattctgcagggcagagcctccagtgaggagttgggaggaatcttgaaaactggtttttattttattttggtttcagaggaaggcggctgctcattctacccatccaaacatatcatcctgcccaacctcatactaaaacaaccaaagacaaaccagtcttcggttcaccctgaggttgaagtctcactttctcccaatccaccatacataaaccctctcttgtcaaatgctttccttagagaatgcagtatgcaggatgatttgggatggaggccacagctgcaggagagtggcattctgcttggaggcagccaagagcctggttttgctgtgaaactggattaaaagctgcctttctcttttgacccttctggatttttttcattgacggggactttcaaaggtcttgagtggggtctcttatttgatttaccaaaaaaacaagcccttttggaatggagccatttgctattgcctgggaagttgttcattgtggggatggctagtggggaacagatatcattgcatcttttatacagaaagccccaggctcatgagggcacaggagctgggcggaggggctgaagcaccataagacagccagccagggatgggggacagcgtggattgctccttggctggcctggggaagggtagcatgagtctcatcccaatgtggtgcctggtaggccactggggatgggttggattggtgactgacagtcattaaaatgttccaagacggagccggaaggaagcagacttgtctcttggacaccccctctgagagctccaaagcccagaagttgcattcctgctaattgtgctgcatgcctttgcctcagtggcttgagcttatatccagagtgttgaaaccacctacacacacacacacacacacacacacacacacacacacacacactccaagaaacaaagaggaatttctgtggttgttcagcccagtttccatgcaatgctagggcccctctgcaatgcccattttttacaccatctagccagcctctctttaaacacctgtgatataagggagctcactgtccaccatggcattgagctccatggtcagacaacccagcctgttaggagggcttccttaatttgagctgcaattgaccccatccctttcatacaatagaaattttcggagaacttgcatacagccagctggcagctaagtttttttcttcaggtgcactgccccactccaccccatcctggccagcctttaggagatcttttcaggatctttggagggaggaacagagaattaggtttataagtgaagatgagggttccctcgattaacagagccctacccaaattcaagttggcatttggggtagttcaggagaaattctaggttaagataaaatcagggagagtggatggaaatgcaaactatataacctctttcttgatgaaaacagcaacagccataggcaacagtgtttgcttatctgggcatcaaacccaggaaactactggcagacttttttttgttttgtttttttgcttttgtgcagaggaaaaaaaaatcttgtctgttttatttgactctggttcaaaccagactatcagaggttttcggggtgggagaactctgatcagggtcatagtccagaataataaaattcatatttgagttggcttcctcttgggagttatctgatgggatggctcactgccatctgagggtcccagtttggctcaaatttctgattctaggcagagccccaagccctgcagctgacagtgaggtgggtggtataccaaaacctaaacgaatgcaagttggagattatctgggctttcttcatcttcctgcatgagttgacggatggagaatcactttctgctgaagatcctgcctagtgagatgtcctccgcccacccaggactgaaaactgcctctggaattaattatcaggacagtccaaaaactcccccaggcgtggataggtggaagctggaaaactgcccctgtccttgccacacacctcctgctctatggagccaggcagctggcaagggaaggggagatgagctagcagattcggggacatctcttctcagggtttggctgcaagggtgtctggccactgttttttggtgaagctgttagaaatggattgaaatggactgggtgcagtggtggctcacacctgtaatcctagcactgggaggccgaggcaggcagatcacctgaggtcaggagttcaagaccagcctggccaacatggagaaactctgcctctactaaaaatacaaaaattagctgggcgtgatggtgcgctcttgtaatcccagttactcaggaggctgagacatgagaatcacttgaacctgggtggaggaggttgcagtgagccgagattgcgccattgcactgcagcctgggcaacagagcaagactttgtctcaaaataataataacaaaaaaataaataaataaacagatcgaaacaaggaactgataaacaagttggtgagatcggaggcccagcatgttcttgtgaggttcacgagaacctgaaaaacctctgaccttcagctctgattgatgttacaggccgacagggtgctggacatgtgggagcagcccagccaggagggactcacatgtgttctggatctcagaaatgccagtgatgagtttgcttgcatgagatttttggttccaagatctctggggatgagaaaactcagtcccttcagatccctaaaggggtgtgggatataagtgaaaccagcccacatcccatcctgattttgagggccatctgtagctctgcttccctgggtctcattcctgcattcatgccctggattcttaagaacaacgaatgggagaaacacacagaaatgaatgaggaaagtcacagcattgacagagtccaggcctagtgtcaagaaatgcctacacaaggaagtcaaaccccaaagtctttccccaccctcaagaaatcagaatcaaaaggaagaaaacccaaacagcccaagggacaatggtaggaactgcaaaagaccagaaaacatcagctacgataatgaccaacaatgaaactcctaagatattgttctgtattacaaaagaagaaattagactcaattgccctattataaatttgctaaaaatacatatatatatatattttatctgaacagaaaaatagactactctgagatgcgtggacattctatgacatagtcgcgcatcagatacttctagagccagaaaaatggcaacagaaaatgcagaggtaactcttatttctgggtgtagccaggactggtttgggttgcctgggctgagtgacatgaaagcatttggatgctgtcctataagcagtgataggtgaggaaacatcagctcggggctggaagctttccattgtcctgccggggtctcaggggagccccttctccctcctgcccactctgcagctacagaaaaagtcctttcccaaagaagcatgtccggaggctttttgccttgctctcttttgattcaaagttacttgaattgaggctgaaaaaaagcctggggtattgttacttgagattagttggtagagaaataagaataggagagagattagcgatagagacctggctttagtggctcttgtccgtggtgaattttaaatatccccttgtccatggaactagacactccagctgggactggagcaagacagaaatatacaatagttacaaatatcaacaatacattacagttttacagaagagaatactgttttgtttttctccttagaaacatggatcttattaggagaaagggcagagacgaggctacagttaccaagacacatggagaagctggaagtcagtttgaaaaagtttgtatcaccagcagttttcaggggcaagctgggtgggttaaaagaaatggcctcctcaggattttgttgtttttccttcttactcttcttccttcttgatccccagtcctttggagaaagggacttcacgggaacaaatgttctctcctccttttttctttccccttgaagtgtgcttaagatagaattcctaaagaaggcactgagaaatctactgcaccaaagtcctgttggtttcttttacccaaagataaaaaggtgaatatactgtctcctccaaagcttccccacctctctcaccgccggtggcagactctcccccgtgtgattgggacacatggctacctggtccctagccctttcagataattgtggaagttggaatgcaagttcagctgggttcttgatgagtttcagtgaatttgccaaactgaccagcatccattcgccgcgtccagcccctagtttgcttgtttgggttgacttgtttctttctgctctcattggttcaggaatgaatgggaaatggaccaccaagttaaagcaggatttgccttcagaccattgctttcctcttctcttctctatcaagacctttctatcgagtgaacttctcagtgaagactcttaagtagatttcccagtgcatgtatattcacgtacataggtacaggttgggtgtatacatattaaaatttggatatgttcttttttagcgggtggatgggctgggaaaacttataatactctctttcgaattgagcacagaataaaagctatactcccccagtacatacacacacaagtaaaagaaaaaaaaacccaatcaaacccaaacaaaatactttctaagcatagtatatgctgaatttcaattattctgtttctataagaactctataggactctggctatgaagcctgaaaaggtaggttcttaatgatacttctgaattcgtccttcaaaagtgactcaataaaatgctactttacggttggacaaaatacacaaggaaggaagggccaggtcctacatgaccacagaaggcagaaagggcctttggttacaaggagagttgcaccaattggttttcgttttttttaaaaaaaaaaaaaaacaaatcattttcaatctgtacagttctcatctgcttcaaccaacaaatgaaatgcctcgattggaagaaggggtggtaagttccttctcaatatatatggctatattgaaacatgttcactttcctgatatgtaaaatagactatattattattattattattttttacagatagcatcagctctaaaaatatctgaattggaaatcacaactatttacttttatcaaaaagcatttgtttttttccctgaattttcacatttgtgctgatggtggacattaatggtgatgaaaacaaagaagagacatgtgagatggtcggcggagaactgtcccacagtcattcctcaagaggcccccagctcagactgcgtgttcagcaaagtgttttgggagtgctgcttcctctgcctggcacgggatgacctcacactctccctgcccctaagtccctttgcagttgctgcgcgaatactctgaagatacctaggaagagtgacgttctcgttttctctgttaatgcggcaaagaacaggactgcaccctcttggggggatctacagtctctggagatgctgagaagtgttatgaattgggtttgtatacagcagagaagacatatttttaagggtggtggaatgatcccatctcatcatatgtgtggcaggtggctcaaccttatgccttatgtatgaagagcaggcagaacagctccatgatatttgtgtactgagaggtggatcatgccattgtactaacaggcagaccagcaacagatgatattgagacttaagactaggtgaaccaataccatatctttcttccactgggaagacatatgcctgttactgtattgaggatagacagaactacactattgtacttgggacatcatccatcaacattacattaagagaacaacattgttccattgtactacagacaggcagaccaataacatgtcatctttactgacaggtgagccaacactatagcattgtattcatcagtggttcaacctaatgccactgtactgaggaatggccaacaacaccatgctgttggactaaaagcaggcaggacaatgccaggtcatcaaacgaggacaggaaaaccaacaccaagaaatacaccagaaccactcaggatgcacacaaatacttattgcttttgtctgtactggctgcatcgatggctgcaggaaggagagttgagcttttagtacagacagtgacactgaaaaaccaatagctggttgacaagaaagagaacagagtaaaacacccaatgtccaactgtcactgtgtccttttgagatgtgcatgtctcctgtatacttgacttcatgagaggccccacccaaggggcaagaacccctcctgacccatgagggttaagggaaggtttcagaggggcagggaaggagcccacagactttgatatggcagacagtaataccagcacaatattacccatgctggccagaaatgggcaggtagcaacaatccaactacagtcccaacaattgggctatgggaaatagtgcttattttaaagtgcaagatgttgacactgtccctggcagaacctatttttgaaaaacataaagtgctttttattttaacttttttttttttaacttgaaaaccacagaaaacaaaacagaatttctattatagtaggtactttccttgctgcagcaggaattattcagtctgaactgggcatttcaatgcgtggtatttttttcctttcatttttgcaagtaaaaaaatcatatttttatgctgttcttcagtaacacacagtctctttgaataaactatttcttttgcatatttgacacttgcatatcttttgagtctacactagtgatgtaaagaaagcgtgttcctcctccaaccctaaaacaatgctctgagttcatgctgttggctgggtgcccaccttctgaacccttcccagattgccagggggcaattagaattgagtacaagtggtgcaactcaccctgatggtatctcaaaataaaatctcaggtactatgaaataccgaagtcaatgaagacatttgagtaagggttttgcgctgggatcgtggcttatggcgcagagacttccccatgaccaatcattccctgtagctgtctaacagtggaatccatccaggaggtgatggacaggtgttcctaggggtggctgggcaacattcaataccaaattggtcaacccactctttcaacaccagccgcttgttccagcatccttctctagctgaagccaggaggactgtcaatgttgccctccgaggctgagatggaaagccacgagagaatggggagtatgtggcctcggtcctgtctaaagtggtggtagtggtggctgtgagttccactcatgtcatctcccaaagagggctatagagttgttacaaggaggtgctgtgccctatggcttggccaacttcatgctgatggacctgtcatggctctcaaggtcttagggagccttctctggagtctctcttctctctgagggctttacagggcctttctgttccagagttcatgcagaaaagctctgtggcaggtaagctgaacagctctcctctttggacctcacccaaaagtctctcctccaaggcagggcagttcagatgctctgatctcgtgtgcttccatgggctcctccccctggcaacacacggacgtcaggggagatgtggttctcaagtttgcacttttcctgaccactggggccttttccagtcaatgcttctgtggagtaaatacagttctgccttaagaacttaggggaggtgggtaaaggggagctttcaaagtggtttttctccgatcttgtccccgtgctgaacttcggactggtgctcccagggaggcttttgggggggctggagtccacactgtagagcagctgtccctcatcatctgtgtctgcgtcaatgtactggtggacacccgcctcaaagttgaacgctattgctgtgtgtttctcaggagaccgggggggtgtcttagcacttgctgtggtgtagatggaggactctgggctcagcacagccttgtccaaaagcgtggcacactccagtccagcgacagcagccgcagcactcccccggttcctgagagggtcatggtacatccctagaacggggaggagtggactggggtcaccctccatgaagttgactttaagtgctcggagcttcaaagggttgttagttttcatggaactcttggggctctcgatgaagaaactagagtgctggctggcatcagggctggggttggcctccacaaacctaccaccactggcacccagagctccccgccagcccacttctggggctgtgctgcccccagtcttgctggggagtgatgtcaaagggctgtgggagaatctggtggcctcagggaagtctgtggcacagctaatgaaactatcaatgcttgacatacttcgcatgtcaatgaccccttctgtgcgagtgggcagaggggctacggggctggggatactctccatttcaagttcttcctttggtttgctctgtgctgctgactccttggtattgaggatgggttgggattgggtcttggccatcttattgtacatgtcttccaactgctgaacgttcaggtgctgaggactagaagacgatctggctttttcaggggatccctgttccttggtttcaaaggacttacttgagctggtttcagacagtgtcctctttgtccatttccatttgttaggagacaagtggttatcttgtactttgtctttcttacccatattctccccatttttctcaaccacaatgtccatcatctcaatgctccgggcaaaagcatccttcatgttcatggatacgatgctgccattcctcttggctctctccagagcctctcgccgtttgattgctttctcctgtctcttctgctccttatagaactcagagaagttattgacgatgatggggatgggaagagcaatcaccaggactcctgcaatgcagcagagtcccccaacaattttccccaggagagtcttggggtagatgtctccatacccaacagtagtcatggtgatggtggcccaccagaaagaggctgggatgcttttgaacttggtgtcgtcctcatccttctcagcaaagaagacaaggctggagaagatcataatgcccatggcaaggaagaggatgagcaagcccaactcattgtagctcctccgcaaagtgaagcccagagactggaggccagtggagtggcgtgcaagcttaaggatgcggagaattcgcatgatgcggaagatctggaccacgcggcggacattctggaattgcagcacgctcttgttggattcggtgaggaaaatggtgacatagtatggcagaatggccaacaagtcaatggcattgagtgggcccttgaagaacttccacttcttgggcgaggagaggaacctcagcaggtactccatggtgaaccatgcgatgcacacggcctccacgtgggccagctgggggttgtctgtggactggccgaactcatcgaggctctgtagctcaggcagcgtgttgagggacagggcaatggtggagaggacgatgaacatgatggaaattatggcaaggatctgtgaggagaagagagtgggatttagttatcaaccaccccacaggatgatcatcataatatcctggatctacagggcactcctcaatgttcaagagcattttcacatttcactagtcatttaatgagccaaaaagagaatttgttgtaatccatttattgtctagatgtggaaaccaaggcccagagaaatgaaatgttttaaagctatcagcaagcccagggttcaagcatactttttcagatagtaaccattttataggccctgaaaccctgcattgtctgtcacaacgactcgactctgcagctgtagcataaaaccaaccttggataatacatacatgaatgggcatagctgtgtttcaataaaactttatttacaaaaataggcagtggactgaatttggcctgtgaaccatgatttgctgacttctgatctagaccagtggctcacactggatggggaactaccttcacagagatgatactaatgataataactatccttgattgagtgttcattgtgtgctaggcactttccatgaaatagctcatttcattcttataataaccccgttcagtgctattagctccattgaacagatgcggacacttgggtttccacagctagtaagtggaagagccagcattttaacccaggtctgtgtgacccaagaacatgagctcttaaggctgtgttaaaaatcagatttggctgggtatggtgcctcatgtctgtaatcccagcactttgggagacctaggcaggaggatcgtttgaggccaggagttcgagtctagcctgggcaacatagtgagactctgtctctatagaagaacaaaggggaaaaaaatcagatgaaagctaaccttttgctagaaaaatgcctagacactcaagattttgcaggtaattcctagggaggcacagacattctgggcccatgttaactcctgattggaactatgtgcttttgggggctaaagaccttggcttaactacctttgagtcccctggatcaagaagagagcttggcccagagaaagggctcaatggatatatgttgaaattaatggaatctaggccagtaggccagtctacagactatgcagaaaagcaaacagatgtaatcaattgctctgagggtcttttttttttttttcaaaaatacaaatccaatcacattactcctttgtttaataaatctccagggctcctcatgaaaaaatccaaacccctaaacctgtctattgggtcccctatacctgtcttgcttttgtagattttccctttctcttcctctgcccctgctaagtgggaaggggggggcctggtcaccatggttgtatcatttgatcctgcctgccaatgatcagagcatgaagtttggataaaaaaatccaagttaagccaatccgtacactggggcttagccagcctacctttgagaaatttgagttcaggaacccaggcggtgagtgggttacgggagggtaagtccctgaattaaatgttaagtagaatctaggcttgaatcagcttcatgataagcccaaccctcaagcaactgtctcccaaatgtaggggacagagatgccataaaaacatcagagaaagctgagccttagcctagacatggtggcttacatttgtaatcccaacactttgggaggctaaggtggggggattgcttgagcccaggagttcgagaccagcctgggcaacacagtgagaccccgtctctacaaaaaataaaaaaatctgctgggtgtattggcacatgtctatagtcccagctacttggaaggctgaggcgggagaatctcttgagcccaaggaggttgaggctgtggtgagccatgaccacaccactgcactccagcctgggtgacagagagagaaaccctgtcttgaaagaaaacaaaagaaaagaaaaaggaaaaaaaaaaaagaaacgaaattagccgggcatagtggcggcacctgtattcccagctacttggcaggtgaggcaggagaatggcttgaacccggcaggcagaggttgcagtgagccgagattgcacgactgcgctccagcctgggcgacagagtgagattccatctcaaaaaacaaacaaacaaacaaacaaacaaacgaaagaaaaagacaaagaaagctgaaccttcaagagaagccagagaatgaagggaaggtgcagatgaaggaggagtggggaccgcaggagggtcatagcagggtgccgagggcagcagttaagagctgaggctctggtgtcagcctgtttgaggttcaagcctcagctctgccatttccttacattgagcatgttatttaacctctctaagccccagtttcctcatctagcaaatgggctgataataacagtatctacctcagagaactgctgtgaagatgaaatgtgttagcacaggcaaagtgctaggacagcttccagcagcacacggtgagtgtctaatagatgccagctgtcatcacaggggaaatctcagcccacatcaccccacccactcagatcaccagcctcggggtggcccggtctcggtctttgcctcctgtccttgttctgagactgtctgctgtatcctgtaagtcaacccaattgctacatgggtgagtgtgggaggtttctggccctgcaatgaatccccagtaaggacacttggttgtcaagtccttctcattttgactctgacctctctctctggccactcctgccatcggttctcaaaattcacactcctctagccgcacactatcattggtcaattctgcatgtccgagcttcttgcttgctgtctggtgaactccaatccatcttttcaaatccagcccatgtgaccccttccctttggagttctccctgctttccccaggcagggttgactgctccatccttgggtttcctcaccattttaccataccttggggatacttaccactcatatcccatcacaggtgcgtgcgtgtgtgtgtgtgcatgcgtgtgtgtgtgtgcacgtgagtgagtgtgcttattgctgcccagaattggtgagtactgggaggatggggatgggttctgaggtttatctatgtgcccccagcacctaacccagggtgggacacctgacaggtgctcaccaagtatttgttggccgttgctcaagttcatggagttagaagtagaagggtcagtaccagaattcaggtttttttttttttttttttagagacagtatctttctctgttgcccaagctagagtgcaagggtgtgatcatagcttactgcagcctcaaactcccatgctcaagcaattctcccacctcagcctcccaagtagctaggaatacaggagagcacaaccaagcccaactaatttttaaccttttttgtaacgatgggatctcactttgttgcccaggctggtctcgaactcctgggctcaagctgtcctcctgccttggcctcccaaagcactgggattacaggtgtgagccactgcactggcctgggaaatatttcttggtcatctactctgcgtgaggcactaggccagacattggggatgccacagggggcaagagagtgccagtgccctgatgggccagctctgaagatgaaagggaatgttccaaggtgtggtgcctccccagcctcaggggttccataacttctgatttttttgctatagttaagtctgacacatcctatgtttaaaaaaaaataggtttgagtttcttgatttgcacccattgaaaaaggaagattctgtaatactttataaatgaaatgtttgaggcagggtgcagtagctcaaacctgtaatcccagcactttgggaggctgagacaggtggatcacctgaggtcaggagtgcaagaccagcctggccaatgtggtgaaaccccgtctctactaaaaatacaaaaaaattagccaggtgtggtggcaggcgcctgtaatcccaactactcgggaggctgaggctggaaaattgcttgaacccgggaggtgggggtggcagtgagctgagatcatgccattgcactccagcctgggcaacaagagtgaaactctgtctgaaaaataaaataaagaaaataaaatgtttgatatatacaaaaatagacctaatttatatataatttatgaaccataatcaaatgaacacctagaacccgccacccaaatggagagacagagcaggcagcagtaacactgacacttcctttgtgtctttcccactccagagataacctctgtgtgcagtttttcgtccctttgtttctctgtatgattttcaataagaatatatgggtccctaaattgtcattttgttgcgtttttttttttttttttttttttttttttaagaggtagagtctcactctgtggcccaggctggagtgcagtggtgcaatcacagctcgaatacctaggttcaaacgatcctcctgctttagcctccgaggtaacttggactacaggtgcatgctaccatgcctggctatattttgtagagatggggtctcactatgttgcccaggctggtcttgaactcctggcctcaagcaatcctcccaccagggcccccaaagtgctaggattacaagcgtgagccaccgcacctggactttgctcagttttgacgttatactgtatgtattttgctacttgtatcactctttccttaatggtaaaaacaaaaaatcaaaaaagcccactcaccttctttattttattttagctttattctaagaaatcatatgcaaaattgctgatttttcatgccagggctatatgtattaaatattcaccaaaataaatatgtaattgttggaataacatcttggcagcacactttttggtgctcctgtgttgagctgaggagtgtgggtcctggagttgaaattctagctcttgccattcattggtggaatggccttgggcatccaaatgttcactgcctcagtttccttatttgtaaaatgaggacatactagtggtttttaaggggatgatttttactcctgggggacacttggcaattttggcagaaatttttggtcgttacaactggtgggaggggtgctcctgacatcttgggggtggaggtctgggatgtcactaaatgccctacaatgcacaggacagctcccacggcaaagaatgatctagcctgaaatgccatcagtactgagattgagaaactctgggacatgccaatagtcagcccctcacaattgtggagttggggacacagagtgggtcagagtgggcagccagtgggctttgggctgagccctacaggaagctgctctcgtctggtgacttctggcaggagggcgcctgcacagggaggaatgggttccctgggagtctgttcctttaagagctgggcagtcttattttcccccaaaggctagcaggggaagcctgctttggtttctaacccccagacaactccagggaaggcccacataattgatgttctggcgacagatgcatgaattatgcacccagctattgtacagacctaaagcaggcaccccttttgtacttgagactgtgccctccctctccccttccctcagcccaaggaagcctaggaaacgagcaaagcagggggaggggctccactggactccaaggtggagggtgtgggggagtgcctgctgctcagggttgggttgggagggtcagagcacacctgccatcggtctgtgtgaatgtgcatcacacagcgtatgcggtaatgcagtgtggggggtctcccctgccccacccctcctgaccccacctgcaagaactttttctttcccagactcagtgaggcccttagaatcagggccacacttcctgcctggggaacttcccaacgtgatttaagccctctgtgcctcagtttccctatatgtaagacagggatcattgcaagactgcaatgaaaattcattgaactcaaaatgcccttagctagtggcacaatcactttaaactttaattgtatttatttctccacatttctttacatttatttatagctggttttggacttgagtttgagtcccaaggctattattccccagctgtgtggctttggacaagccactccccctctctgagcctctatttccttttctctgaaatgaagatgaaggtaactgagtactcacctaaaagccacttaatatataatgttattaaattattattcagggccgggtgtggtggctcacgcctgtaatcccagcactttgggaggccgaggtgggcagatcacctgaggagttcgaaaccagcctggccaacatggtgaaacccatctctactaaatatacacaaattagccgggtgtggtggtgggtgcctttaatcccagctacttgggaggctgaggcaggagaatcgcttgaacccgggaggcggaggttgcagtgagccaagattgagccactgcactccagcctgggcgacaagagggaaactctgtctcaaataaataaattattattcaggtaatttatggtcaaccccatccctaacctctgtactggttgcttttggaagccaggagtagctgtgtagaccccagtgactgcctaaggcagcgtgcgtcctctaaacagctcgtggacccagatggactgtgttgatttggtttctgggataagccccaggaatggggaactgactaccacctgggagtcctcccagccccagctcaggcctggacaggcctctgcttttctgggatctgagcccagttgggcttggcagaactccaggaacccggggagcagaggcaggagccagctccagagactgggaggctgtccccaaattccctgtgaagaggttctggatcctggagcctacctgtctgcaccaaatgggagagggggctttggtcctctgggggaagagattggcaggtggggatccccagggtggaattcaggagtgctggagccaggccctcctcatcctaatcgtcggctctggtggttaatcacagagaggcctacggactgtttatcgtggcctctgcacacttccctgctgttccaggaatgtggatgaggcacagactgtccatgcagaaaagggctcaagcttcctgctgggaagatggggaaactcaagcagagaacggaagtgacttgcccacggtcacacagcccattgctgtcaacactgttcagtaacactagaagctttggcaagctggaagctgcacctagtgtttagggcttgcaaattgctcttcgtaaacatgcaggtttatagctgcagtattcataatagccccacagtggaaacaaccccaatgtccgtcaactgatgaatggataaacgaaatgcagctatccatacaatggaatattcttcatccataaaaaggaatgaagtgctgatatatgctacaacacagacgaaccatgaaaacattatgataagtgagagaagtcagacacaaaaagccacttattatatgattccatttatatgaaatgttcagataaagcaaatctatagagacagaaagtaggttagtggttgccagggtgggggatagggattaacagttaatgatcataaaggacgtcgtgttctaaaaactgacttagggcaaagcctgcacgatttggtaaaatttaataaaaattatcaaattgtatgctggaaatgggtgtgcattatatgatacataaagtaagcctcgataaagttatataaaaagttgctttccataaagggcagcccattgctattgcttttcttttcttttttctttctttctttttttttttttttttttttgagacggagtcttgctctgtagccgaggctggagtgcagtatcgcgatcacgactcactgcaacctccgcctcccgggttcaagcgattcttgtgcctcagcctcctgagtagctgggattacaggccaccacgtccagctaatttttatatttttagtagagacagagtttcaccatgttagccagactggtcttgaacccctgacctcatgtcatccacccgccttggcctctcaaagtgttgggattacaggtgtgaaccaccgcaccgggcctttttttttcttttgagacaggatctcactctgttgcccaggctggggtgcagggatgtgatcttggctcaccgcagcctcaacctccctttttgtattttttgtagagatggggttttgccacattgcccatgtcagcccattgctttccatccccacaacatatggatagttcataggagagaagaagctgagcaagccacagagctgctgtaagccctgcagcgactccccattctcccagttaagttccagttcctgtgcctttagttggcatgtgcttattgagcacttcctaagtgctatgctagttgctgagggtgctgcatgaataaggaagaaaatttcctagcctcatggagctagcagggagaggcagaccaaaaaaacccaaaaacgtaaaccaggaaagaggcaaggtgatgtcagatagtgttagatgctgtgagttattgagaaaagcaaaccagggggatcgatgcagaagcactaggggtgtccacgggaggcagagtggtcagggcaggcctctcttaggaggtgtctcgttgctgagacttaaaaataagaagtgtgtgtcattcaaagatgcgaacattctaggcagaaggcacggcacgtatgaaagccttgggtgggaataagcctggtatatcaagcaacccaaagaagctcagcatggctggggctgcatgagcgagagcgggagagcggggtgggcctgatgagacctgatgaagagatctgggttttatattaagatcccttttcttctctctcctgaccatttcccctatttcccattgtaacccacactgaatcctgcagaaaccacttaaagttcccaaactcaccaccatgggtgcttccacctctagatctttgctgttccctctgcctggagtacccttcctcctactccaaacccacttctcctggctggttcctactgcctattcaggcctcagctttggggccacttgccccagcgagccctctctgggcccccggtctgcattaggtacatcagttctctgagctcacacagcccctgcgcatctctgatcacagccctggtgctgctgagctgaaactgttttctcctttctgtcccacactaaagtgtcacctccatgagggcccgaactgggtcggtcttgtccagtgctgtgtcctcagctcctgaaacagtgcttggtacagatgggagctttctatatagctgacaaatgaatgaacaagtgaataaagaaaatggaggctgagagaatgaagtgacttttccagagtctcgcaacttgtaagcggtggttccagacccatggacttgatctcaggtctgtgggtctcccaagacgttttcaaggacgtaggaggaggcggctgctggcccatcaaaccttcggtccttttatggtgcttccgcttcccccagctttaaggggggattacagctggggagttttaattagaagggtcactggtgcagatccgattaaggggattgggagcaggctgatggggttgcccgcatcccctacaggcagggaggggtccctggcagaggattggtaagacattggagtcagaagcctgcagggggcgctcgtgggcacaaagggacaggaatcctgtgcgtgtacaacaaaggatgaaagcagagggctttgccatgagaagaaaacagtcacaaagatggaaagaggatggagggccactgtggagggcgccctagcccttataacccagaggctttgctgctgggaagtttatttttacttggttgaccgagtttcaaaattgggagattttacataaaaatccagattttcacattcttttggaaaattagatgctcgtcttcactcaacctgcattcccagtggcaaccactggctagagctaaggaacagcaaccccttgggagagtgaaccagctccctagtgtgccacaggcccttcacctgttttgtgatctgtctctgcaggcagctgggtttgcagtcactgacccacctgaggcgataatgaagacaacacctgccatagggtatgaagaactttccagacaagatctgcatcagactccacaagccaggaacatgggggtcacacttgctataccctgccctatccccatacccagggatcaggagacaggagcctgcagggggcaggctaagagctaagaaggataagtaggaagtaaccatgcagagtgaagggaaaagcattccaggcgaaaggaacagtgtgggaaaggccccatggcaagaagatagtggttgctaagtctgatcaattcaagttcaccaacatctgcgcatctgttccattctctccacctgcacagtccccaccctcccgcatcaggacttctttctggcctccccaaaaccactctctggcccactattgcaaagaccactagctgtcaccaacatctattcttcccctcttccattgtcacagagttttagctggacccagggctgcccagaataaagactacatttcccagcttcccttgcagttagatgtggccatgtgattaacattggccaatggaaggtgagcagaaataatagaagccctgtctccttttcctccttgctggctggcaggcagatgtgctgggcagagctggagcaactgtcttggatctgagatggaagcgaatctcagtgctagactggccctttatggaaaaagtttgccagctcctggtctatctcatgacatccatcttgttgaagccactcactgtattttggggtctcattgttacagccgcttagtctctccctgcctgactaactctccagccttctcttgttccatgctcttctctgccccctcatctcaggtacattaaccagtaaccttcctttggtcgttcatagtcttcactatcttcttgccacgggacctttcccacactgttccctccacccggagtgcttttcccttcactctgcctggttacttcctactcatccttcttagctcaagatcacctgttcaaggaagccatccttgactttcctgaccaagtcaaatcccaatcacagactctcatagtactattatccttctcctcataacactgttcaagttgcaattttgcagtaatgtccacctctgcagactgtaagcagtgtgagggcaggggttatatctgatttttctcaatcttgaatccttagagcacatagttggtgctcaatacatatctatggaacaaaggatctcatttcatcctgataacaatcctacaggctgtgctgtgcctccacctgttttataattggggaaactgaggcttaagaacaaatgtccagaggaacaattaagaaaatagtagatggccaggcatggtggtgcaggcctgtaatcccagcactttgggaggccgagttgggcagatcacttgaggtcaggagtttgagaccagcctggccaacaaggtgaaaccttgtctttactaaaaatacaaaaattagtcaggtgtgttggcacatgcctgtaatcccagctactcaggaggctgaggcaggagaatcgcttgaacccgggaggcagagtagtgagccgagatcatgccactgtactctagcctgggcaacagagcaaaactctgtcaaaaaaaaaaaaaaaaaaaaaaaaaaagaagaagaagaagaagaagaaagtagtagagagagagtttaaactgatgtatactagactttgatgcccttctttattttaaaaaatatacatacctgggacctttcttatcctagtatcctggggtctggtttttaacttatgccttcacttgaaccgtctctctgaggtaactgcactcttcttaacaagctctgggttgggcaacctcttcctaacaggccagccaggttcccacaagcctctccaaaggcaggaattctgggagatggtgatgtcaccatctcctgccaacctgaggacaatggtctctggtggaggaggaagagggactcaaaactgatccctgcagagggaagaggggatgaagaggcttgtttctgaaggggagaaatgcgagacagtgtgctccctgcctgggtggttgccaattccctatatttgctgaggacatgagcaggtgggggaggaactgtcagtgttaaccgtgatgaatggcacgggtccattcctgttgtagagagcaatgtattgaatgaaaaatgaggagcacaggaagtgttaggcaaggacagtgtccccaggttctgccggccacaaaccggtttccttgtcctctgagtctggctggaggggactggggagggtagtctctgagagcttgaccaaggtggctggggttgctaatggaagctaattatatgagtctggagagatgctggggttaggtagtactctggctaatgtcagaataatggctctgtgagtggtctttttttgacaatagccagatttactggttaatgtccaatctactttttgaaagagacattttggtggcttaacaatagatctttctcatctattatgaaattatagcagtttagtctcaccagagattcatattgaggtgaaatggacacgtgggtagtcaggagacctacttttaattctggctgggcatgcttcggcaagtgtcgtcacatctctgatctttctcatgcaggatccactgagagtctaatgggtctccagtacagttcctttctaggtggtgactcaagaacctagtggctctaccatctcaattggtagcctccagtcttgccaaggcagaggaagggacagtgtgggcaagtcacacttgctcttaaatgcccgcacccaaaagtgatacacatcattccctccctcaacagtgaggcctctggtctcttactgtgtcctccagggggacacagtaagtgctttgaaacttacaaaatgctttataacaggctaaggagatggtccccaatatgggtgtgtgcacaatatgacacactgcagtgcagaaacaaatgactggcatttctaccctttactgttaaaaacaaacaaacaaacaaaccaagaaatcaagttttcctgatgttaagtccatgaattaacatcgggatccttgttcactcagtatgtcaggcagccatggagaaaggagaagacccctggcgggagagtaggggtgcttcagcttagcggggttggcaaggaagccctcacatctttgtttgatggccgcagtgccatgtatgtgtgtctggggtgaagagacttctagcactcatgggtgtctggttccagtcttcttcctgggcaaaatgtctatttcctcgaggcagtggggcggggatatctggttctgtatgggctctgtgtgggtactggcagaggcatttaagagtgggtgtgagttcttcacacaaaactttgatgggtaaagtcaagagattgtggatttcttcattactgtagcacaatctagcatcttctcactaattcatctggtcgagtcaggttacagattctattttctgattttaagctaactagtcctctcagacaaagatgaatggcttacaaagatcctggaaaacgggcatggtggctcacacctatgatcctggcactttgggaagctgaggcgggaggatcacttaaggccaggagtttgagaccagcctggggaacatagtgagaccctccctcccccctgtctctaaagaaataaaaataaaacataaagatcttggtaaagccacaagggtttgggggtagtattagcaatggaaacacaggagaacatcaagacagtggctgaactgatgcttcccccaccccagtggtctgagccctttggcagtgaaaacacaaagttaaaaataatgatgatctcatcagatctgacaagaggttggccagaaaagggttgaaatgatcaggaagactctttgtatgtgaattttcatctactctcttttacagtgagccctattctcattcattcatcaaagaaagaaagaaggcaggataaatgaaatttgataaggaatgaatgagctagatccagggggagggaggcactagaatgtgttggttaagaaccaggacttgcattttaatctgttttcaattttccagctgtgaggcctcggacaagtttcttaacctccctgagcctcaatttcttcatctgtgcaatggggatcaccagagttcctccctcactgggttgtcatgtgggaattcaatgagataatgcgcgggggtgcctggcacgcagtaaggcctcgatgaatgttagatgttcgtttgttttaaagctgcgaggagtacttcgcctcgatataaggacgaccgttctaatggtgggagctgttacaatgagctattgttattatgcaatggagggaggccaaagagaaggatggaatcagcaagatctgggttcaaatcttgcccctgacatttactggctgtttgaatttacacaaggaacttcatctccatgagcttcactttcctcatctataaaaagggactattaataccaacatggtcagattcttataaggatttacctcattcattcattcattcattcatgtggggatgtgccaggtaatcttttaggccctggtaatactgcagtaaacaattcaggcaaaaatcccagtttgcacggagctgatggttttgtagagggaaggggcacacagtgaacaataataagtcaacaggatcatttcaggctatgataatggctatgaaaaaatgaagctggtcaggggaaagagaatgactatgagatggtttactttagctggggtgatcaaggagggcctccttgtggatgtgacatttgagctgagacctgaatgataaagaggagctggccacatgaccatcagtgggaaaagcattccaggcagagggaacagcaagtgcaaaggtcctgaggtaagaacgtgtttggcaagcgtggctgaagtaggttaagtggaggggacagtaaggaatgtggtaaggggggcagatcttagagtgcctccaggccacacacaatgagtgcagaacatgctattattattagtatcattagcagcagtcttcctctgactcccttgtttgtcccccactaaggacctgctttggaaaacaaggacatccattcttgtggttctcctggaagatcccttcagttattcaactgtcccacatgaaaacattcagggcagcaacactccaagtccttggtctggttgttgaaggggaggttgactcactagagtgtaaggaatgattgcattaattgtccaggaaagtgacaaggaggtgactctggtcatgcaattttgagctttggcttcaacctttgggggcctcgccctgccacctcccattctctcaattcttaatgctcaggggtgagatttctatgggcctcgggccactttgaggaaagccatgcgtgcacgagacaagtatccattttctactctttcacagaatcctgattttgtgcttacgtgactactttgcttgaagataacaccgcccagcctcccctgcagctggatggaggtcacatgcttggatctggtcaataagatgggagtcggagtgttgtgtgggacttctagaatctcttttttcttttttgtttttcgtattttttttcttttttttttttttgagaaggagtctcactctatcgcccaagctggagtgtagtggcacgatcttggctcactacaacctctgcctcccaggcttaagcgattctctgcctcagcctccggagtagctgggattacaggtgcgcgccaccatgcctggctaatttttttgtattttagtagagatggggtttcaccatgttgcccagggtggtttctaactcctgagctcaggcgatctgcccgctttggccccccaaagtgttgggattacaggcatgagccactgcacccagccccagaatctctttaaagcagggaaggctgcctcctctttttagatcttcctccatcctgctgccagggatgattacatgattgctggaactctagcagccactgagagtcgtgagactgaaaaccccactctgggaaaagcagagcagaaaggtggaatgaggctggggccatgatgactttatagagccatggtactagtcgtggactattttcatctggactgatgagagaaatatacttctctccctgggtctcactttgttatagagccaggcctagattctaatcagcactgcagtggttagcccagtaattctccagtatatggagaatatggagtacaacttacacatggactgccaacccatctgatagtaacacaggcaaaaagacaccggttgcccagaataacgtagcaatggactgggaacaagttgctcagaaaacaactccattccatggaacttgagtagttccctgtgtccttaactggctccactccacacccttccttccttccctttctggactctcagtagcctctcattttcctgttctaagagggaggtcaacagagacctcggcaccttttcatttgctgttccctgggcctggcctggagagaccttttcctgccacctcccctgccccttcaccagtttgctttcttccttctttcgggactcagtagcaatgtcaccagcttttcctagactgaattaagttgagtcagccctttcattgccctgtcacagcagtctttgtgaagtttcatcactcgccttcttaaagtcctccagtggtgtcctgctgcacttgaaacaaggtccaaactcttatggaggctgcacggccctgcctgacttggcccctgttgacctctctgatctctttttctctgtgctcttgcacatagtcactcccttccagccacactggccacctgtctgctcttccacatgccaagcccactcctgcctcaggacgtttgcacttgctgtttctctgtctagaacatcctcatcccagattgtctgtgactggctccttcttatccctcacagtctctccttagagagactgtccctcactgcctgattaaaaatacctcttcctcagtcactcactcttgctgcactgttttacctccttggtgatttgtcacaatctgcagtcatttttttttttttttgacagggtctcaaaagggtgcagtgatgttatcatggttcactgcatccttgacctcccaggctccagcaatcctcccacctcagcctcctgagtagctgggaccacagatgtgcgccacaatgcccagctatttttttttctttttgtagagataagatctcactatgttacccaggctggtctcaaactcttgggctcaaggaatccttccgcctcagcctcccaaagggacgggattatagatgtgagccaccatgcctggccaaatcattttgtttatttgtttgtttactcatttattttccgcttctccaccaacctaggttagcacatcaagggcagggactgtgtctatttcacaaggctgggtccccactgcccagcacagagccagatgtggcattggcactcaacaaatactggtgcactaaatgactgcctgaatgaatgaacaggtgaatggtttgtgagttggtcagttggatggagggatggatggatggatggaagtttggatggatgggtttagaagccatgaccccaatcggaccacccaaatgcaatatgtttactgagcacccctcctatgcaaggcactattggaaaatgcaagcttgaattagcagctggatgcctgatactaatgatataataacagctgagatttattgatttctcaccaaagcaggcactgcgccaactgcattgcatgaccgatctcatttactccttatatcaaccccaggaggtagatactctcgtaattcctgctttgcaattgtgaaaaccaagcctcaaaaaggtgaggttccattggaggaggaaacatttgggctggggcttgagggctagagatggattccagcaggcagagatgggagtaggggtgttctaggcagaggcagctgcatattcaaagggttggaggtggggaataacagtcaagccagtttggctagggcaggtgtgcacacagagagaaaactggcaagaggggagaccaccatttactgcacacccgcgacatgtgaggtaccaaagcatttattcaccatcaccccaggaagtagctcctcttttcaccttcatttttcagaggatggatctgaggcttggagcccctaaataacatgcccagagccacacagcaggattaggacttgaattcatgcctgtctcactctgaggctgggtcagagatggatagtcagaggttcaggaaggagttgacaaggctggctatggagtaactgagcatgtactgggagccaggcacagcatactatctcaattaatcctcacaagtacccaggaggtaggtattagtgtggtggatatgtttttggatagtttagcatcattttttgggaattgttcctcctccacaatcacgcattaagtgaagttgaccctgtttctccgtttcagggggtaagagtgagatccaagcttaccagttaggataattcatctccctggccacagggattactttagtagtgtgggcatgactaaaattggtcaatcagggttcatcctggaactttttctcaaattattgggaaagaggtggtctctttcatcaggggctgttgggttaacaggatatcaaccagaagtggctggagggtcaactctggctctctggggaaaaaaaatctgcccaagagtgtagccaaagcagagggactctgtgccaagacacaaagacaggtttctaatgacattatttgagcacctggatccagccatccctgaagccatccctttggattttccaacaatatgaactgatgaatgctctttttggattaggccagttgggctggatttctgacccttgcaaataaaaagtgatctgactgaacaaaattgttatcttaattttacaggtgagagagctaagattcatagaggtaaaatgacttgcgtttaggatccacaggaaggaaggggctgaatcacactgagatatcacaaagaaagtgcatggcatctaccaggtcctcaagaaatgcctgttcccttcttccatagatcaaggagtggtggagagaaggacgggaggaggtatacccactggtggaagctcccccatgagccgcaagcttctgggcagattctagattgcatctggaatcctccaaactctcccagcctgcactggggtctggcaggagcaaccaaagcccaggagttgacacataaagtgaacaagcggtcagatgtcagcatttgaacaaaattcctgaggatcccactctctccaaaaaagtgtcatctaagagccctggctgcaacacagggtttccatagaagggccagaagtcttagcacttctcagggcttacgcttagtaggatcttgtacagataattgtttcagtaccaccaaggattctgtggtcacttgaacttctcaaagctccttcatattgaaactggatagagagtaaggggttagcctacaaactttgactttggacaaagttgggttccaatcctggcccttggcagctgggtgactttcggtacattacttaacctctctgagtctcccgtgtgaaacaggcagaatcggaagatgaagtcagacaaaacaggtagacactcttagtacagagtttggaaccacttcagcttttgggcaagcagattagttctagatataggttgaactctggcatgtatgatcacattaactctctgagcctcagcttcctcatctgtaaaatggggctcagaataataccccctgcacaggtggttgtcaggcagcaatgaaatcatgcatggaaaatgcgtaccccagggtacgcatgtgaaccgaggacaccctgccagcaggacggccccccactcatccaccggcagggagttttggcccacacagtgaattcgttgccaatatttattttccctatgaattcacatttgagcttctcaagaaaaatctgaagctctgggtactcttggtccacgctgctccgtggcaagcccaggctgccgctgcgcggtgttaagtccagtcctgtactctaaaatctcacgtgcaccctgtgcgtgttgtttatgaggctcgcttggcttctgcaggaatctggtttgggagcccaggaataaatcattagacgtgtagccagcgatgagggaaaagattaaacagtgccagagaagcagtcatgggttccttagggaatgctgggccaagagctgggtccgcgagatgccctggatcaggaatatgcggatggaatccctgcctgggccagcccctcatccatccgtatatggctgcagagaagccatgttgctgcttccttagagcccctggctgcattttcccctcgtctctcctgcttctagactgctctgaagctcctcctagtccccaccgctcatcctaccacacctcagtaaagcagaattagaggattaaaaaagacgggcaggagataggggactactttagcccaacggctttggagggcctcactgaggaggtgatgcgtgagtgcggatctgaggaatgcaaaggagccagctcgcaaagatctggggaaaggccggtccgggcagcagtcacggcaagtgcaagggtcctggggcagggaagagattggcaagaagaggaggagaaaggcgaccagtgtccctggtgctagggaggaagacaaagggcgtgagagttgaggtcaaagagagaagagaggcaggcctttaagacctgataggatgttttgaacctgagaatcctgggagccacacggccatggcctaatgtaggtttaaagatcccctagctctagccaggcgcagtggctcatgcctgtaatcccagcactttgggaggcggaggtgggcagattacctgaggtcaggaattcgagaccagcctggccaacatggtgaaaccctgtctctactaaaaatacaaaaattagccgggcacgggggtgggcgcctgtaatcccagctactcgggaggctgagacatgaggatcgcttgaacctgggaggcagaggttaaagtgagccgagattgtgccattgcactccaacctgggcaacgtgaaactttgtttcaaaaaatagtaaaataaaataaaataaaataaaataaaataaataaaataaaataaaataatccccgagctgcacctaggaacagcctgtagggggactggaatagaaacaggaatcaaagtgaggaggctgtggtaggtgtccaggcaagagactgtgtctgttcacagtacggaagacaaattcaagttatattttggaggtgaaatcaaccaattgctgatggctcagatgtgtggggcgagggaaagaagagtcaagatggaatcccaggttttcatcctgagcaactgggaggatagtggtggtgtttcctgagatggagaggaatcggaggagcacctggggccagatcatgggggtgctgtgaacatcagctgaggggtctggaccagaccccgcagacaatggggagcttgggaaggcttctgagcaacagcagaatattcattcagtcattcaacaaacatttgtggtaaaagcttgtccatattctattctctcacagacggcaaagctccccacaagcagccgtgggttatgggccacaaacatccttcctgggcctatagagtgcacgagaaagctctacctgcccatccacattttcccttcccgacttcttcacctctggcttgaggagctgaagagcatttaaaaaatattcatggctgggcgcagtggctcatgcctgtaatcccagcactttgggaggccgagataggcagatcgcctgagctcaggagtttgagaccagcctgggcaacatggtaaaaccccgtctctacaaaaaatacaaaaattagccgggtgagttggcgtgcacctgtagtcccagctacttggggggctgaggtgggaggatcgcttgagcctaggaggtcgaggctgcagtgaaccatgtcaccgccacagcactccagtttgagtgacagagcgagaccctatctctaaaaaaaaaaaaattaaaaaaattaaaaaatgaaaatatttatttactccctgcctgtcttttcctctaaaagctccatgaaagcagggaccatctttgtaacttcagcatctctcatgcctagacctgtgtctggtacatagtaggtgcttaataactattgaggaactgaattttaaaaataaataaatgagccctagtctctcagactgaaggactgactgagagcctgtaaagtgccccgttcagggcctggtatacagtagacattcaataaacagtaatgaaaatatacacagaaaatacagccactctgtcaggtccctggtaggtcttgaggcttctccagtgtaggaaaggccagaggagtaggagggtgaggtggcctgtgactcaccctcccggggcccctgtcttgggcctaggcctgtgggcatggcgtctgcactaatccggctaagcagctggatgtgcaagggtgtgtaatcccaggcctgctggctttagcctgaccttggctaggatgacccaagtcaagaagaacgctcctgtcctcttaggccacccagagctgagaccctctacacaaccggggacagggatctaaaagacccttcttgggggacagaggggtggcaggctcacctaggtctccccccgaagctccaacccagctatttggggtatgcatctctgcacccctccccccttgctacatctttgccccagtgtcctccctgatggatgatgcggcacagaaatactatcggggaagaaaaggggcattcattcatcaaacatttatggagccaagctatgtgccaaacacttttccagatcctgaggacacagcagtgatcaagacagactctgtcttcagggaactgatatttgggtgggggaagcagacatgaaatgaggaaataggtaaattaaaaaggatctcttcaaggtgcaagaaaatgggctaatgggatagagactggctgtagggacatcatcaactatggtagtcagggagggcttctctgaggaggtgacatctgagctgagacccaaagatggagtatcgagttgtatgaagatctgggaaaggagcatccaggtggagggaagagattttaatcctagtgagtcatataagttggcaccattgagtacactgaatagataatgaacataataactaacatttactgagtaccgacaatgtgtcaggcccttttctaagtgctttgaatgcaataactcatttaatactcaaaacaatcgatcattttcatccaattttacagatgaagaaaccaagccacagagaggtcaagtgctttgcccaaggccacacagctaacaagtagcagagctgggatttgaacccagggctgctctacctcacaacctatgggttgttccctatctttacagcacattaatgttttacaattaaaaacattaattgttgagcattaccaagcaccaggtcctgggacccatggcgtctttatctggtcctacctctgaaggccacccactgatcctctgccctgcacctctctctcaccctcttctgatgtctctactctgaggccacctccagctccaggagtggccatgtggctctgcctggtccaatcagcatagaccaaccctcccagcctttgtgattgactgagggatgggcatgtgacacaagatggcttcatgagagtggatcttggaactttgcaaccatgggggaggaggagttctctttgtttttttgttttttgtttgtttgtttttttgagacggggtctcactctgtgtgcaggctggagtgcagtggcacaatctcagctcactgcaacctccgcctcctgggttcgagcaattctcctgactcagcctcctgagtagctgggactacaggcatatgccaccacgcccagctaattttttgtatttttagtagagacggggtttcaccatgttagccaggatggtctcgatctcctgaccttgtgatctgcctgccttggcctcccaaagtgctgggattacaggtatgagccatcgtgcccggccaggagttctcttttgagggaaaatgtctagctgggagataggaagcctggagcccaaagagcttgcttgagagtgaagccctcgtagaggagggcagagacaaaagatggagagagactgagttgcaatgacaagcactgatggtattgttcgaggcctgtgtatctgggccagagccagaaccacttctgaacttcgcagttgcatcacccctcccattttttttcaagcttaagccaatttgaattggatttctgtctcttataactgcaatcagaaccttgttttcctcctggaatgttcttccttcttttctctcttgctaccaattaatgttactcttatttattttttatttttagatgcagtcttgttctattgcccaagctagagtgcagtggtacaatcttggttcattgcaacctctgcctcccaggttcaagcaattctcctgcctcagcctcccaagtagctgggattacaggagtgtaccaccatgccaggctaatttttgtatttttagtaaaaggcaaaagatttatacgatctgaagagaaaccagagaataatttttgtatttttagtagagacagggtttcaccatgttggccaggctggtctcgaactcctgacctcaggtgatctgcccgcctcagcctcccaaagtgttaggattacaggaatgagtcaccgcgcctggccccagtaatgttattcttatgaccaccattaatatgaccatcactgccatcgccagtacagcgactattctcatgaatacttctattgccactgccaggaatgacagcatcatcctacttttaacacagtgaacacaggggccattattgctacactgatgctgtttctactactctttctgctattagcatcgcacttcccatttgtaaacctctcctgagtttacaaagcactttcaaaatcctctcattctcttctaaacctcaccacactcccccatgagtggggcacagtcactactgttagttccatcgtaggggcaggggaatcgaggttgcagaagtgagaggaactgcttgcagccatagccaatgggactcagacccacctactcattcatttattgacgaggtggcactgaacgccttcggtatgaggatggactctgctagatgctgggacgcagcagtgaacaacaccgacatcgttcctgccttcgctgagctgccctttgggtgggctccagaacattccaagagcctccctcacaggccccacaggaagccaggccaggatcattctgttctcctcagaattctgagaccagagtggaggagcccagtttgtgagcagaattgaagcactgctgtggattttacttcttacctgagctgccttgggcaacagacccagcctttgagccttccaacaagacagtgaattccttggcaaggagagtcctgacttaatttttctgtctctgctacagtgcctagcacagggtcgggcacagagtaggcactctgtaagtgcttattaatggattgctgctcagaggcagaactaggcctccttccatctacccaactttctattcttctatttgtctaatatctatcaatttccttccttcttctattcatccatccatccacctacccacctatccacctgtccatctgtccatccgtgcattttcctaccttgcttcctccctccttccttctctccccgtccctcccctgttctccttgggcaatgaagaattagtccagcctccaggtttttgctcctgctgtggctactccgaaggctccttccccaggatgttaacattttcctggctcttagcaatttgcaaagagcttgggagactgaacaaacaaacaaaaatccagattctctcaaccacttattttctttttttttttcttttctttttcttttcttttttttttttttttttttttgagacagagtcttgctctgtcatccaggttggagtgcagtagcgtgatcttggcttactgcaacctccacctcctgggctcaagcaattctcctgtctcagccccccatgtagctgggactacaggcatgagccaccatgtccagttactttttgtattttttgtagagatggggtttcgaggctggtctcaaactcctgatctcaagtgatcctcctacctcggcctccctgactgctgagattacaggcatgagccaccgcacccagccttcatccactttttgaggcactccgaattcctactagatttcttatctttcctgacaacccagtagcaatcctatgcttacttttaaaactcttttttctggtttcctgcatagtgtgctctctctcctcccctctactgccagtttgggattgaaaactcaaccaggccagagcagtgactcacccctgtaatcccagcactttgggaggccaaggcaggaggattgcttgagcccaggagtttgagaccagtctggggaacatagtgagatcctgtcactactaaaaattaaaaacgtagccggatgtggtggcacacacctgtggtcccagctactgtagaatataataaattcgtcttcaaaggttttagcctgtaaattgttaagtacaatgagttctgagatcctcttcaaagaaccaatgtatcagtatgttcagctcccctgttctttgttcttcattttaaagtttaactttctcgttctttacgtctccttgcccctagtttcagcaaccaatcttctcctagcctctatcacctgctctgaccttagtcatctttggccacctggtctgttcttagtcatcctgggtcacctgctctgttcttaatcatcccgagtcacctgttctgtaaccatccttcccgccaaactactcaccctgccactccagcttgtacctctgcctctttaaaatagccaatcggaattaccttagactgtgcagtccaaccctagccaataggggaaagacacagcagcaggaactagctgcgttgggatgagaatcccttcccctcccttgtctggtgtgctctccccattgctccatctgcgagatgcacccttctatagaagtacaattgccttgctgagaaaattaaatttatgtttgagtgctgtttcttttgcggcactgaaaacttatttctaatattactcaggaggctgaggtgggaggattgcttgaacccaggagattgaggctgcagtgagctatgattgcatcactgcattccagccttggtgacagaacaagggcctgtctcaaacaaaaagaaaagaaaacctaaccagctactgcagctaggcaggaagtgcaaatgaccaaagcaggctggatatcgaactccaggaaggagtgcatgggccacctctcaagtgggcggccactaccagctccaagagggaatagatgtggcccagagtggtctaattttccagtttctcagtagaaacaaacaagtgaaagtctaggggttcttttggtgaactcttcccaatttgttaatgtgggtaactaattaaaatatgtaaatgcagttcagttcaaacaatacatgcttacaggatagagctgcctctcttctctttacaacccctctggtcactggccccctctttccctccctaccctgcaaattgccacaagagagctcaactccaagaagagcttattgctttgaatacaaacaaaatactgctcataatagctgctacccaaaactgaacatccaagtactcaagtcacctctattgttatcattgttttacaaatgaagaaagcaaaaggctcagagaagttaaggaacttgcctaaggtcacacagctaagtgacaaactgaatttgagcccagggctgtgtgactccaaagacagtgatctagcccagtggtggtggcattttgccacaggaggcattttggaaatgttagggaggacaggtgtttctggttatcatggtgatactggcattcagtgagtgggacccagggataagagacgtcttgcaatgcacagtcctgtgtcgtgaagtcttgtcttgttcccaatgctaatagtaccacggttttccctcttcccccacaatggcagccattattgagtgcctagtgtatgccagggactttagatccagcagtccaataaggtaggtacttttagtatctccattttacagatgggaaaactgcagttcaaagaggggaggtgacttaacaaaggtcacatgaactgggaaatggcagcagggctgagtccagggtgaaaaaaattaagggtgtgaaatttaaggcattgccaaataactcagtaagcaagataaatactactttaatgtaacatttaaaaaatcaaacttaatgtaaaaccccccatgatgaacaaaatatctatattttcaataaagacaggatcagcaacactggtgtgctaagccatatgggagtgaaagggaaaaggaaaaaattaatactgatcttgttttgtttcgtttttttgagacagagtcttgctttgtcgcccaggctggagtgcagtggcactagctcggctcatggcaggcaacctctgcctcccgggttgaagtgattctcctgcctcagcctcccgaatagctgggatcacaggcatgggccactatgcccagctaatttttttttgttttgtctttttagtacagacagggtttcaccgtgttggccaggctgatctctaactcctgacttcaggtgatccgcccgcctcggcctcccagagtgctgggattacaggattacaggcgtgagccactgtgcctggcctgatcttggatttttgtgcccaaggtgagtgcttcgcttaactcactttagtcttgtccctgagtggcaggccatgctaattgtatctgtctctgtctcaccagcctcaataagatgtggggagtccattcttccactcccagtgctccaggacttcagcacgaatggtgaaattacaggctccagaaagccatgatttctaaagcagaagacggacaggcctttaattagagccaggcgggtgggtggccagctaatactaagttccataatactaagttccgtaataagcactgtatttttgaattcactggcttgatcacacacatcccggaggcatctttggaaatttgttcatagaaaatagggtaaacagctatttgtaccctaagagagggaaaatggctttacagtggggtggctatgacaagggtgtgctctggtggcagcagatctgggacaaaccccaccccaccactcactggcagtgtggggctgagcaagtcacggccctctctgagcctctgctttctcatgtgtaatgggaatgagaacacctaccttgctggtgatggggaagattaggattaatggacagtagagtcatatcctcatgggtttggttccaacgataaccagtaagatgaatatctatcacctacttttgaaaatccctacctttatattgtgaggacctgaaaactggaagctcagaagccaggaaatgatgcattttatcccagatgtggcctctctgtttgaggcaggaaggtaaccagctaatgcagagggtagggtgggggtggttagggaaaggccaacaggtgaaggagaaaaataaaagaatttttctttgtctctcttccttctcaagtctcatacattagatgcccaggtgtgaaactctgttctagctaaaattctctggcatatagaagagctcattctggttcaggttttccaaggaacaatcagcaggggttccagaccacacaaatggcctgtttctggctgtaatcacacgtgggagctggctaatgtccccggagtcaggctggagtggccaagacaatcaccgtggatttagccaggggctgctgccttgggaatctttatttgtgcttgtgttgcctcctctgcttccaaggataattaccagggaggtgcacaaattggaggcaaagacaagccactcgtagtgtgcaaaggaccctgatcgtgacagtgcaagtaaacaaaccattaggaatgcaaagattgacagataacaaacaagatccgtgggcaggtgtggtggctcacagctggtaatcccagcactttgggaggccgaggtgggcggattgcctgaggtcaggagttcaagacctgtgtggccaacatggtgaaaccctgtctctactgaaaatacagaaattagctgggtgtggtggtgggtgcctgtaatctcagctacttgggaggctgaggcaggggaattgcttgaaccagggaggtggaggttgcagtgagccgagatcgcaccactgcactccagcctgagtgacagagcgagactctgtctcaaacaaacaaacaaacaaacaaaaaacaagatcttctgagcaggagccactgttagctggaggttggatccagtgattctcagcagggtggcactacccataaggacatgccctgaaaatgtgcgagggtgtcacaaggatgggagaggatgccacaggcatgaagtgagcagaggctgaggacaccaggcgacctgtaatgcacgagacagccctgctcatggataaccttctcttgtcctgctcaatgttggagtgtcccagtggatactcaggtaggtgaacaacaacttgtttaaattaattttagactgtaacttcattttatatataaacccgccaaatatgttttgccaatgttttaatctaccctgaattttccagaaatggcaacgcctggtgaagcaagggaagaactggactttcttctgttcagaactttaccaggagttattcatcgtattggaaaagtcatgcagctgatgtcagtgctgcttgggatatcagagctgccagcacacctgtacctctgtttttgtcacggtcacactcatggtgcttctatgtatagtggaagcatctgacaacctcatggtgttttctggtgttgttgtcctgaccaggcatttgcatactgaaacacacacaagtttaatacaaacgtccttgtaattattcgttctaaagttagggaatgatattgatttttttgaagttacatatatagtatattatctgtgaatttcattttagaatacgaagtggtgggagaagttaacaaaatatttgttatttataaaggggacttgggctctgggagtggaaaactgtgaccctggaaggtgcacgtgtttatacgtctcacccatgcaaggtggccttccttggctgtcttctacctccctgattaggctccaactctctgctcatattttcagagcgtctgcactttttttctttgcggcacttatcagaaccaaagtgcacatgcaccaccctgagagcgagctcctccttcaattttgcatcctgggcacctcactcttccaccctcttctgggtcctgcgaactagcttcagctatttgtagaattagctgtaatgcccatctccccaaccaagctgggcgctccagtgcggggatcgtgcttgctgcatttattgctatatctgccgtgcttagcgcagtgcctggtgtgttttagtcactgattgaatgagtgaagggctgtatatttcatatacatcataggcaaataaaaatgaataaattttaaatttatggcaaggctaaaagatgatcagccctgggtcagcacagagagggtctgcgaaagcaagtaagacctagtcttcctccgtctggcagcggggagagacagatgcaaagctgaggcaagggagacagggaccctcccactgcttgggagaaacacgtctacgttagctgggggcaggtg
